United States Patent Application Publication US 2007/0054278 A1 - sequence listing, part 59

SEQ ID NO: 95325 - DNA, 714093 bp, Homo sapiens
  misc_feature (1)...(714093): n = A,T,C or G
aacaatacatgaaggagcatttcagaaagtaataaacacaaatgaaaaaataaacttttcaacagaactggtaaccaaagaaacacatattaaaataataaaagatataattttatttatcaaattggcaaaaattttaaaatgataatatctactattagcttcagtgtggagaagttggaactctcctatcttgcttgtaggagtgataaatgttattacctttttggagtataatttggcaatagatattataatttttgtaatttaatatgcaagcttgactgcatccagcaattcatcctaaggaattaatcatgattcatgcaaatatatagcctgaaggatgtttatcacaaggctgtttatacaggaaaaaaaaaaaaaacaaacaaaaaaaaacaaagaatcgacaatagccttttcgacaggtctaacaaattatgtttcatccataaaattaaaatttaaaataactatgcactaactaaacaaattgtaggaaaacattcacattatttaaaaatactcatggaagagtaagtaaaaaagagaacatagcactattaatgaacttataaaatatatattaatgcatagaaaagagactgggtagctgtatacccaaaagtcaagagcagctgtctctcagtggtaggattttgaatgactttcattttcgtcttttttcttcaatgtattttgtaaatttcaatggtgattatattaaattatttttacaaaaataaaaatttgtattatttttagaaaaaggtataaaatgatgattaatgacttaatcttaaccgaagatgagataatgagaaagctgtgcaatatcacaggaaatagagaaaagaagaaaagaaagtaaattgtaagattaaaaaagcaagtaaaataatcatgtcctttgcagcaacatggatggagatggaggccgtaatcctaagcagactaactcacgaacaagaaaccaaatacctcattttctcacttataagtggagctaaatattgagcacacatggacatgaacatgggagtaatagacactgtggattattagacgggggagggagagcgggggatgtgagctgaaaagctgcctagtgggtactatactcactagctggatgcgatatacccctgtaacaaacctgcacatggaccccttgtatctaaaataaaagttgaaatttaagattaaataaaagcaactaagtgtaaatagaagaatggaaatggaaaaatcatatttcataattgtgtttcggtccaagtaatccaccaagagcaggtcctaggcgttttgtgtttatcatgtgtgccaaaaattcatattcagcaaagtgtgcaaagtaaaaagaaagaaaaacgtaatgcacatttatttaatcaatatatgaagagttgatatttatttctgggccttagtaacaacttggaaaattctaaatgaaattaaatgcagtacacaaattcagttcactgaatatttcttttgagtaatatcaagtcccacatttagctatgatgtctcacttactgttgtgatggtgttatttgtgcagtctatagtactttacactgtacaaagcatttgtgtgcactttatcccacttattcctaccaaaaccccatgaagttatttgtataggttccactttacaaaagaagaaacaaaaatctgggatgttgacttccaaacatcccctaatgttcaaagccaagggaaaccaacaaaaccaaatctaccatggtttattctcaggctgaacattactttgaaaaataccagtcatgccagccatgaaatttctacattttattttccttctataataatacactataattccaatattgtttgctctgtttctgttgttgatctctacgaatatgtaaaagcaaccatttttgaatattccaatatagattttgcagctactttcagcaaatcatattacagcttcttcatattccatgcacatgttgcaaagaaaaagtgttcaagttctgcaaattatgttgacttctttgaaaatcttagcaaagctctatacagtcatgcatcacttaacaagaatacgttctgagaaatgcatccttgggcgattttgtcatggtgcaaacatcacagaacatacttacagaaacctagatggctcaacctactacaaacttatggtatgtggtatagcctattgttcttaagccacaaacctgtacagaatgttactgtgctgaatactgtaagcaactctaacacattggccagtgtatgtgtatctaaatataactaaacaaggaaaaggtacaataaaaatatggtataaaagataaaaaatagtacacctgcataggacacttacaatgaatggagctttcaggactggaagttgctctaggtgaatcaacgagtgagcagtgagtaatatggaggacaaggacaagactgcacattactatagactttataaaccctgcacacgtaggctacggtaaatgcattttaaaatattttctttcttcaataatcagttaaccttagcttactgtaagctaacatttttttttacatcttttatttttatttttattttactttacgttctgggatacatgtgcagaatgtgcaggtttgttacataggtatacatgtgccatgatggtctgctgcacctatgaaccggtcatctaggttttaagccccgcatgcattagctatttgtcttaatgttctccctccccttgccccccaccccgctacatgtcccagtgtgtgatgttcccctccctgtgtccacgtgttctcattgtaagctaagattttttactttagaaactttttaaaactttttgactcttttgtaataacacttagcttaaagcacacattgtacagctgtacaaaaatatttctttgtattatcattctatacattttttctttttaaattttttgtgtacttaaaacttttttttactaaaaattaagacacaaacacacacattagtctaggcctacacatggtaagagtcatcagtaacactctcttccacatctacatcttgtcccactagaagatcttcaggggcaataacacaaatgaagctgtcatctcctacgacagcaatgccttattttggaataccacctgagaccattctgtagttaacattttttttaagtagaaagagtacactctaaaataatgacatgaagtatagcatagtatggcaaatacataaaccagtaacatagtcattgattatcaagtattaataccattgatcatttattatcaagtattaatgccattacttttaatggcaaaaactgcaattacttttgtaccaatcaaatatgatgtaccatacataattgtatgtgctatgagtaatgcactgtgctataacattacaacagctatcacatcactagatgataagaatttttcagctctgttataagcttacgaaaccactgtcatatatgcagtccattgctgactgatatgttatgcagcacataactgtacttcatttctaatttgatttttaaggtgtttatgtaacaaaagatatgtttatttaagagatgtactttagatgaagtgatttaaaatacctcttaaataattagacatttagagacctttgaggataatttaaaggttaaattggcagcacattaggttaattgctaaaatattatgtttttgtgtcctgcctacattgtgaacattcaaacgtaaggattagaaagtagtctctaaaaaaacataagaaataattaaaattagcttctggcccctagaaccgcttttcactctcattctggttatttagaggatatatacatccgagtagatacgtcatctagcaccttgactctgggtgcttttatctattctcattcaatgacctttgcttccacttcatgacagccactcactctcttagatatatgctggcaattctcaaaatcagttgtgtaactcagacttatcctctggcttctagaaacacttacccaacttaacatttccatttgattgtctcacaggcatttcaaatataatatgtacaaaatggaattcttgtattccacttaaatcttattatattctcagtctttaccacctcagaaaatggcagcacgtgcactcagttgttcaagccacaaacctggccatcattcttggttccttattttgtcttaccttcacattcaatgcctcaaccagccttttctttgtaccttctaactatatcatgaatcaatccagcatcttttatgtcaactgtcattatggtggtccaagctttcttacaaaatttcacctccgcttccaatcactgtctcctccatctagtcatcacacagcaaacagataatcttttaaaacaaaaatcgcaagagtaccaactctcattaatttattgaatggtttatacatgcatttcatgctctacattaaatatatatttcacatccttccacttttttagagctttattaaggtataattatcatataatatactgcatgcattaaagcataccatttgatgagtttagacacatgtatatgcctttaaaatcttgagcacaatcaagataacaataatatccgtcagctccagaagtttatttatggcccttttaatacctccctcttctcttctcctcccatgtctgcagagcaccactgatcagctttatgtaactcaagatcagttgttattttctaggaatttacacaaatgaattaatgtctccacttgcctcagctattcacatagagtccaggttaatttcttcatttccactcttccaaaaagaaaaaaaaagtgaacaagttcaatgaaaatcactgagaaaatgccaacatcggtgcccagtttttagagttacttataaattataaaactcccgaaacactacaacactttcatggacttgtatctttctcaacgttgataaaaaattatattaataataaacttccatgttgttgttgttgttttgaaacggagtgtcactctgtcacctgggatggagtgcagtggcacagccttggctcaccgcaacctccgcctcctgggttcaagtgattctcctgcctcagcctcctgagtagctgggattacagatgcacacgaccacgcctggctaattatttgtattttgagtagagatggggtttcaccatgttggccaggctggtgttgaattcctgaccttaagtgatctgcctgccttggcctccccaagtcctgggataacaggcatgagccactgcacccagccaaacttcgaggtatataattaaaagtttaataagccctcagcctaattttaaaattcagattctttctttctttctttctttctttctttctttctttctttctttctttctttctttctttctttctttctttcttctttctttttctttctttcttgataacattattatcatagtctggtagattctgtctttctataataaaaatcctgtgatgttgttcaaagaaactcaatgggctttctgtatgtttaccaaggaattaaaatcttaacaaaggttttcaacacaagaaatactcccttttgtaagaattcttcataggtttttctagcacaagtttgtttttattgaatgatacttgatggttctgtatgttatttcttttctactacatataattttgattaggggatacattaaatattttaaaactatcatttctttttccagaacaatcataacatgttttgcttcttgttgctttaaaaggaacattttaagttgcttttttacaacaataagtgtgaaaggaaatgccaaaatacaaacaatttcacttcttgttggaatytgacatttccactagctaagtaatataaacatgcatcacctaaatgagcagtattttaatagcatcgttttcacattttaattgttgtcacatttcttctttgtttagggagacgtctggtgaacacccgtgggatctaaagaacaagtaagatttaaagcatactgggttgtgtgcctggctttcamattttatttattttattgcttaatagtgtttctttactactgtgggttgtagcttaaaattgttagaaattttattatggagtataaggaataaaagtgaacgttcaacactttcaaattatttggagtcttaaaaaatatacataaattttctgtatgtagtaggcagacacaaaaatattatgtctttatgtatatagatggagtgaaatttcaagtcctaaataatgggtatgtttttatgtggaagagcaaatacacatctatagactgaatttttacacgatgatttttataagatataccgttttatttaaaaattgtcttagtgtgacctctagcctatcaatggagtaggttagtgagcagtgagtagttgattcatttccccaaactccacctcgtgtggaaccatgattctgttaacaccagagagtatgaacaatacaacaaccacccaatagtggaatgagatgtgttgggatggttatgagggaatcttcagttaatggattgggaaagagaaagtgtgaagtgcagtcaaaaggaaagcaaatgagtaagggaagaactgaaaataataaagaagaaagacgacagatcttcaaaaaataaaaataaacaaatagagtaaacaaatagattacatatacttgcacttcattgtaaatatttggaagaaasaaaagagaggtggaacaaatacaaagtagtaagtagagactggaaactaaatatagagacacgatattcaataaatagtgcctaagagaaagggaaagaaaaaagtggtaaaagtagaagaaagttccattttaaatttttgctttttcacttatttgacaatttacgtaatttaaactacaacttgaatggtttataaatagaagccttgaatatttttatctatttcattgaaaaagaaaaaaattctagtcatcatgcaattattcgatgtttctgagaaycttgttttatgctcaatttaagccatgtttaaatgaagaaaatgtttcttgatttatttcaagtttccttactagtgttctaaactttctatatttatgaaatcacttgattctaaaaaactgaaaattgtgcatttaaggaggtgaaataaatcattaaaatgtatttatactctgcggaaagcatatgttaaacaattcaaatttacagttagaatggttcaaattactccggcgttcaaagacacaaagccctagaattaccctgtagttatcctgtaattgctatttgctggcaaaggaaagattaacagtggtgctgatctcaactgtaatacacagatttaccaaggaacctgtagaattgagtttttctatccaaagaatgaatcataaaaattcagcaagatgacctttcttttcattggcataaagataaaacaagtaaaaattcctttttagcagcacttggaaaagtatggttgttcgtttatggttgttgctgttgttcatgggtttgggtggctattatgtattaatcatttatcatcrcaacaaagggtctttgttgygatgataatcttactaatagtcgcagtgtcttggagaaaattatttggttatttatgattcattatctataatacacatcactactaggccaccatacattgttttttataaccatagagtagagctctgtgggggcaaaagagaaaacgcccattgactctaaatccaaaatactgagtaaaatcccagcaccaccattaagagccactttatcttcctgctcctcaatgttttcatgtttaaaatgagaatactgcctagtgacaggattgctacggtatttgagcaagttgtcattctgaaagtactttgaacttggtcaacattgctggatgacataactggggagtcttgggttctagctccctgcaagtgaagccacccaaatgactttgcaaagactgctacagttgtttgtacttgtgattcaacattatcattttttaastcatttagggggtaggtcaaacgaccatttaagaagctttagtcatcagcctcattgctctggatctggagtgtagcctcataagaatatcctgctgtgggtgccttatattcctctaatggaataaaactaggaccatctccccgattttaaccagtactaggctggtttgttttacatatattctctcatgtaaatctcaaatcaatcatctaaggaatatctgtttgtccccatttttggatgattctcataaagggttagtaatataactgaggtaacacaaagagaaaagagaaagaattggaattggaacccagaacttgttccacagcccatgtatattacaaatgtattttactgccttcctcagtgaaatgtagtatttttagtgcaactatttgggggaaaattgtcacagtaattttatccacactggtgtggagaaaacatctaatataaaagacaaatgtttgagggagaggaaaagcaatttcgcttcccaaggagggtgacacctgctgaaaggggctgcagtaaggcagtctcagagttgtgccttggacaagctctgtgggaaagtattagtgagcatkttttttaatcctacaactctttcctcctttggcagttaacagcaaattcctcaagtcctgctgcctgtgctttaaggcccaattcttctgcattcctatgatcatttagcagagagaagacccaactctactttctytctacttattggcattcctcacctccataacaacaacaragtttgtgcccctgattttctgtttatggtcaaaaattggtggttgatctacgtatacttgctgaagtcagggaagatggtaattattatatccaaatgtacattgaacagtccttttgaggctccattctcttcatcttctttaagaaaaagtaagtcattagaaagaaatgaaaataaattattttgttacagcaaaggggtcccaatccagaccccacccaagagagggttgttgcatctcatgcaagaaagaattcagggcaagtccatagagtaaagtgaaaacaaatttattaggaaagtgaagaaataaaagaatggctactccatagacagagcagccctgaaggcagctggttgcccatttttatggttatttcttgatgatatgctaaacaaggagtggattattcatgcctccccttttcagacaatgtagggtaacttcctggcattcccatggcatttgtaaactgtcatggcgctggtgggagtgtagcagtgagraygaccagaggtcactcttgtggccatcttggttttggtgggttttggccagctcctttactgcaacctattttatcagcaacgtctttatgatctgtatcttgtgttgacctcctatctcatcctgtgacttagaatgccttaaccctctgagaatacagcccagtaggtctcaacattgttttaccagcccccattcaagatggagttgctctggtttaaatgcctctgacacattcatgattgattgattgattgtttaatttttttaaaagctatctagttaatttagttaaaataaacctggcttattctttttttamacaaattgattttaaatagttaaaacatttttttaaatccataagtaattcttactctactcatttatacacacatatactcacatgtacacagacatacctacacacacacttataaatacatgtatacacagaatatagcaaggtcttttatcccttttcaatgaaataaatattgtattctatatttagaataaataatgttgaaaaagtgattttggagaaaggttgaaatgattgagtcttaagtgtgtcaatgtataatctacccctttctaaacatcgtgttttaagtagtcatcttacttcagaaattagaggytcaatgtgtttagaaatacatttcatcatgttcatacacaatatagatttctccttcctcagattgtctcccatgtaaatatactgcttgataaagatgacagtcaagttaacttgattgctggacagctgtattgttattaccataaataaacacacatatttcctcttcggattattcctggcaaggaatctctagacaaacacaatgctttcttctggattgattgtgatcttattcactctaggtaatcacatatgtatcgttcatattaacacttttataaaactgaatttagtatgtagaaaagttcaaagtaaaaagstrtactattaggtgacatttttaagggcatgactaaaagcaaaaatattattgacaaatctttggagtcttacacaataaaaggaatctaatttacacaacataagcacatttctgttcagattgtgagaatgaaagatcrtggagaagttttattcaaagatrtcagctttgctcatgaaactcaaataaatgcttccagaaaaaaaaaacaaaacaaaacaaaaaaaaaaacgaggtaatagcatggaccaaacagttattcattttkctctttaattccaaaaacagrtactattcctctctgagtattacatagagcttacgatttacttattatagaaaaatggtgttatctacaacaagtacttattatgacatcagaagatatcaagtagacaaaaatgcagcagccaagagttcaagagtgagggagcactcagagtccagtcttatagtgagattggttaaactgcaagatgcacccaacaaaagatccattttatctgggaacctcaccttgcacgttgatactttcaggccagtagaggcccttttgtgaaagaaagaaatggtttaattagtgggactccaaggattaaaccaatgttgacaatggcaccttcaccaccactggaaaaaacagtgggtacatccccatacctgttatacgtaagcatttcctgagttttgagtcgacttggctgcttgaatcagggcagagttgcttctgtatgcaatgaaatgcccatacacttggtcattatagttaattaactgccctccaatgctgcctgcaatgcatatatacagagaatatagcaaggtcttttatcccacggaaagaaagagaaagagacttgttgcttttgtccattggagcaggaaaaagcaaagcaaaagaaaacaaacaaacacacaaaaaaacactatttgttaaacatggactgttaccaaacatagaagtaaggttccttccatatttgaagtctattattagttctgccttgtgactgatcgcttctttgctatcatcaatgatcaatgataggacccaacaatgtcagtgcagcattctgggggcactcccatggcgcatttattttgcccatcaccttgagagtggttttcaagattaattctagtgtcggtggcctcgtatattaattattgcttcagaaacgcttcatcggagttcagtcattcttttgttactttgatgtaaacccccaatgcctcagatattgaaaaaacaaaaaacagaaaaaaaaataagagctagcaagaattttcaaatagcattggtgcttaaaaaacaaacaagcaaacaaacaagattatctgtgctatctgcatccccccctttaacgtcttttctttctgccsctgttagtgtcatctgttgtgtttatttttttcattcaaaaaatttagacactcaaaattttgctgaaaatttcacctaagactgtgaccaactgtctggtataaattggatatagatttctagagatgtaggccagtagatagtgaatacaaaggcaagtcacagattttcttttagcattgctgagttttgtgaagttttatctctgcctgatgttacaggatatagtggcaagaatatacaccctcatatggcagaaaatagcaatttcttatcctggatggcagaatggcaaaaatacatacatatggcatcaaactttaattgatagaacttgataaaaaaatttcaatactattctgtaaatctccttcaaagtctgttttgttctcacatccacttaaagtagaacagtcattagacattgcaaatagttttccctgtctgcatgtgaaaggaaagcatcttacccatttgatatttttagacacttataccgcctatggaatttgcctacataactccctttcatgcatggatttcttgcttctacagtcatcttaaatatggtgaataatgcttggcttatggtcctcactcagtcaatgtttattaactaagtacgtattgggcaggtttgttagtgttctatgattgtaagaaactcagcagattaacacaaaatatatttattatctctcactttaaggtaggaaatgtcttagttgggtcctctgcaagaatgcagtgtgtcagccagggcttggttctcatctggaggcttaactggtgatggattctcttccaagtttactcaagttgttggcagaattcatttcctgtggctgtaagactgagggctttggctttggctgttggctagaggctactctcagctccaggagctgcctgaagttccttgactatagctttttccataggccctctcacaacatggtaccttgcttctttaaagtcagaaagggaaagggacacttcctattaccagactgatagcaaggtggaggcttatataatgattcayaatcaagagagwaaaatcctatcatctttaccaagttctattggttagaaatatgtcacaggtcctgcccacactcagtgggacaggattatacaatctggacaccaggagaaagagaccaaaggaaagaccttagagtctctttgccacaacagataccatcaaaagaaccagtgccagggccttccctgaaatcctaactttgaactagaattgaaaatcacatcagagaaagaacatcttaatttgttctcactaaggaaaatgaaaaatatttgttgaaagagctgtagggtgtagagttatcattatactagtttactaaagtaccactgaagtacaatgggcatttcctattgtaagaggcagaatcttcagggaatagggatgtattcttagctactctggcagggaatagcatgtgaccctctttctttgctactgcattctgagtcttaggcctttgaataacacagttttttcttaatgtacacctcacttctctactattgtttggcctataacaaccacagaggtaattatatccttatatcctatgtaattatatgctgcagttaatatgtattttaccatatatttatccataggtctgttttctcaaataaccacttaattctatgatatttaaatgaaaagctccaggcttactagtcttccaggatgtgagaataatagatgaattataagctatttcccccaaaaaagagwgtgttgggatacgtgagaccatgtaaatgaggagaagctaygactgatgattcctgaaaagactccccccacttttgtatcttcctggagttcaaaaacagatactatttctgagcacccctacagactagaattgccactctctacttaggagacacagtctctaaggtaaccaggatacacatatcatagcatttttaactagggcaatctaaattatgagcatgctacatatgaatcctaggccaaaggaaatgttttctgtaccaaaataatcaatattaatcattaaaatttaaaaataatggtatttattcatactttcgtgaggacgcccttggtggctgttgtgcaataagcggataatatttgtctgccaatcactagcccatctcacatgtaaaaatgatcacatgacaatccagtgcatgtttatcacccaagatcttgtcagcaactgatggcacactcaaaaagagtgttcttaatagaggagagcttaataaattgactatttacagagggatggacaagatgaaaggatcaaggatcatcctgggttaactggaagcaacttccacactttgrsttgataaggttatcagaacccagaaagatctgcactgttgaagagggccactcagtaagaacctaacctcaagtgcagaaaagcaacatgtgaaaacatgtgcactggcagatagagagccagggaaataaataacagaactcctctttccttttatcttctaatattctgctggtatttcccattacctgaactaacaagaagccacaaagcaagagagcctagctgatgcagtcaataaatgttgaactcaccagacacagagcagggggataaaaggtgagaatggaatatcctatagcatgtcaatgtgcatcagtaactcaaaaagtcttatggataatgttgtcccatttgtattaaaattctaacttttgttcatagtctgatttctatccattgtgtcttactttcttttaggcttggaaaatattggtcaaagatatgttgaatctgttactttctaacattgttttagaaactgcatcaaccatctactgaatttgttcagattttggcctcttttcagaaatctgggacttgtaggaggaattgctgaaatcttgaatgattttctaaccattcacaattgtagtttcccctaaggcaactcctaaaaatttccatctttgtcaggctggtcatgtttaggacatttctgtaactccaagtcyctttaaagggaaggcctaagagaactgtacggagcaaaaaattactcaggatccctccgtagaggcaccaagtcaacctaaaattctcataactccttgaaagcaggctagtgaaaatttggagagaatttatgamgattagtataaattatagcttattatctagtatttttgcaatctgtccttatactcgttatgtggccaaagcatccaaaaaatgctttatgcctagatgtgagctagaatatttccaaattggcacatacatcacagaatgaaatcctccagttttatccacagatacaccaatgtcatctacatctaaattatattaactctaacacaaatcatcattctacttgtttcttatttctaagcactcataaaaatttttacagttctaatttttttttctccataccaacttgcttcttatcttcatatacttttcctcctttccagttttaaattaaaataactgctgaaaacccctatggcacacatttacctatgtaacaaacctgcacatccttcacatgtaccctggaacttaaaataaaataaaataaaataaaatagaaagaactgctgaaatttgtggagcctttagacactacctttaggattgtgaaagctctgcaacccaatatttcaattctgttggggttaagtctagcctttctmtgacttagaactagtcaacttttattaattctcaatttctctctccttaagcatatcatattcctggtaatttttggtaagattttgatgctgtgtatataaagtgcattgtaaatatcaaacaaaatattgagatagatattggaaaaaaaaatcctaaataaaattttaggtgaatgagagaatgatttgtacttttagagcaagttctactatttttatacatacattagcctgattatatgggttttgttgttattgtttgttttgtctttcaaatagatttcatctgaagctgttatgccaaacactactttagttcttcatttaagtgtatttatatgatatcagattttccccttgtttttacaacaagctcaatgatataaaatttatcttaagcaaaattgtccttatgctttacctgacatgcttccttaattaatattatggttaaagagaggaaaaacataaggttttacaagggttctcaaaaatagttatagtaacagagtatatttaaaatcatattaccagcaaatcccagtaataactaaggagacgaattaaaaatctttgcaaatgccaaaattatgttaaatagcagttggaatattttaacccagaattctactgtttgatttcttcacacttcctttcttgcatcaaaaacaaaggtcagcagcataataggtacaaagttaactccatcctttttttccatagaattgtcagattgacacactagaatgcgttttcactaaataatgaaggggaggccgggcgcggtggctcatgcctgtaatcccaggactttgggaggccgagacgggtggatcacaaggtcaggagatgagaccatcctggctaacacggtgaaaccccgtctctaataaaaatacaaaaaattagccgggtgtggtggcgggagcctgtagtcccagctactcgggaggctgaggcaggagagtgacatgaactggggaggcggagcttgcagtgagccaagatcggccactggactccagcctgggcaacagagtgagactctgtctcaaaaataaataaataaataaataaataaataaataaataaataaataaataaaatgaaggggagaaggcctgtgttacctaacagactctcatggactgtggctttcttggctagaacataggataagtaaacatcctaaaagttaaaaacatgaaaagccgccatcttgtcatctttctttatcaattttcgtatctgtttttctaaagcagatttttttaaatttctgagttaatgggtgcagcgcaccagcacggcacatgtatacatatgtaactaacctgcgcattgtgcacacgtaccctaaaacttaaagtataataataataaaatttaaaaaaaatgccaaatttcaaaaacaaaaaaaaaaaaacacttttctaaaatgggtcatatctttttagctttaagtataacagacaaataaaaattatatatttatggtgtaaaaaaaaaaagaaagaaacaactgaaagatatgcttaagcaacctttggggggtgtaaaccacaatgaaaaaaaaaaaaaggatccaagtaacaggaggtcaaacacgggagaagggtaaatggaattcccagaaaaataactatacataggtatctaaagcaamaggtccagattgatgtaggaaggtaaaggcatgatggtctctgagaaaggaatggaattgatggaaagttttagctgttttggagtgattagaaagaaatattgataggtttgtatttggtttattggagtattttagaaaaaagtaatagggtcaagcacataaaaaaataaatatatttttaaaattcttcagggacttgtattgaaggtatagttgtacaaaaacacattttttctcttagattttattaattttagaggctttggagggtaatggagactacaccctccttgttcctcttgtcacccttagccatctttgggctaccagttagcacaaagtcatctagtatggaaaacaaaatcaagtgattcagagttgaagggtagagtgaagaagtctatcgaaattaaatttttatattttcctaaaacagattactgtatatttctacatatacctctactcataacctcatcacagtttgaaatgaaatttaatgtagctttwcattttgatttccttaagatgtgtggatgggagcacacacagtattttaattttataatttaaaataaccaagcagtcagaagttaagataagctgaacttactttttacttgctataaataggcaaatcattaaatgttacaaatagtccattttctctaccctatcttgctataggttgggacagaggaagaaagagttattagatttactgtctacatttatctagctgtattaaatgtaaatatgaccccccaatattttttaaaatcatttctttaatggacaagtactgcttcattaaatagagtttttttccatactataaaaaaagaaaaaacatattgaaaaatatctgtggagtcatttgaactccarttaatctttatcttagatttcttactatgccaaagtatgaaacttttttaaaatatcagggaaactgatttatgatatcagtaatactccctaaaattatggttagaccagcaggcagatgcttacgtaatatcatttcccaatttcacagtaaaaataacaggtaggttatgtgaataaatatggtaattgcagcccaatgggaattgcaaatttagagttcaatctccattttaacaagaagtcacttacagagataaaactctggggatcagtgactattcagaataacgttagtctttaaaattaaatttgtaaataccaagggaatgaatgatttgtgccttgtctattccttaacataaatagactttctttttaaaagtatatgttttgttcattcttgagaacaagaagaagaacaaaaagaaaagaggaggagaatccaaatttataaattatgcaccattatatttgctctcatagcccatctaacataggaggacctagaataatagagtcagactttaatgttgaaaatcacattacatcatcggttggatacacctctaatctttcttttaacagctaaattcatgtgcttcagacacaaaagtgaaagaagtcttcaatgaatcagttgcactgtgcttcattctaaaccagacaacagccatcttatgggttcattgatgcattttgttctatgaatatcaaaattatttaatttatgataagaaaatttwaaaaaaaatccaggctattcagacaggagccccagaagctctctggtaaaggaaattctagaactgtatattttccaaataatcatcacatatatggctttatttttctatagcaagtcctataggttagtgaagccagttaactggtctagaatagtagcccagccactgaacaatcagagtataagtctgccctccagacatccccaattatgataagaaatcttgatttcctcgtctgaaaagaaaaaggatctctcatttaagaaagtcatggttatagccagwgaagcttgctaaaatgcattrgagaataataaagtgaactttattaaaaggcacccttgggtacaatttcatcatcctctacagctgaaagcagcagaattttagtcttcttatrcttaggtttttatagaatgccttttaaccaaaaggatcagaagagtgtaattgcaggcccctttttaaatgatctgtgaaagttgggtggttcattcaggatgcagattaatttcatacttccttgtttggcacatcaattatttcatgatgatgttcctctctcatgagaattataaattaattatcattaataacagtcattatttattaggcatctcatatgtagcattcaccatgctacttccacttacacatgctatttcttgttttcacaacattcaggcaaggtggttgctgttttatctgcattttattgaggagcaaattgtcactcagatggagttttgcatttcttctatatcattcaaaatgcctagcaatgaactgatcagatagaaagttgtcaatacctgttgttgcctggcttattattaagctcctctaagctagttgagcttgcttccatttctaccagtggaaacagactatagccatagcaaaactatttggatctttcccctgaaggtccattcaaaatatatgcactagagggcataaagagagcatggctaatgaaggaatggctggttccagcaaatgatgctatggcctataatgagtttaacacctggcggataatgcaaatgacactgaaaattagctcatttttggcttccccgtgccctggtcaattgaacaaaacttacattgaaaataagcccagtttggagttttgttttgttttgtttgtttttcctatacacacgtgttttgaatctgagctatggctcagtgctgtacacttactagttcctctgctcttgctataccaaaagacatgagttttatgggctctaggggaggtttgattttcagtcctacctctggtatacaggcagttttgccctccgcaggcagttttgccctcattctctttatttgcagggtggttatatcatccaaacataaattaatttttcctggtactttttcaccttttgaaaatgggaatgatccatatggctaaagaatgtcaggaagagaaacatttgggaagaattaaatgggatgcaatcattccggatcttgatcatcttagccaacaagagccaagtaaaaaaaaacagccacagagtgttatgtgccaaaattttcgaattccagagagtttatactatataggtgattttaaactgacatgattatatagttccaaaaataattgtgttgagatggttgaaatgtaggaagagaataagggtatgaggtttatattttatatgataatttgtttaaaatattttatatataccttggagatatttcaaatctttttgtggcatattcttaaaatttaaaatgagttgaaataatgtggatgcttcctaaattacagattataccactaaaaatgatactgaatatcaaaacatacaataatttgaggagttctgattgacaaaagctgtttaccttaaattcyttcaaacaacaaaactgtagtctataaggggttagagtctgtgagaacacaaaaagatttatctaaaggagaaacataagcacaagaatactcagtattggtctttgcaatgcagcaaatgatttatagtgagatgagacctagtccagagattgagttcgtttaggaatgcaatggccataagactaagaagtagacaatttgtttaaaagacaacaaatcacatgaaagttgatgcattgtcatgttcctatgtgtagtgacgttatcaggcatttacagattgcgagttttctgattttactaacagagctaagtctttaacaatcttagtaagaagagaagagcctttttccagctatcmcaggccagttcgaaaacacagaatgggcattaaggagaatagatttgaagcagcaagtaagcaaccaacatgcttgctaatgatatcaaagcccagctcagcctgtcattcacaatctacttactgcctattgctaaaaagcctttatgctagagttagatgactgtttaactggcattaaattaggacatccaaaatgaacactgagatccagccaacaatcaccatcatagaccagtcatgtcttagctcacctctcttggagtctgtatttctaaaaccatattcaaaatgtgtctatactaaaggagaataggcatttgagagggtagaacacaagtaggcatattttaatagttggggccagcagagggaggctttgggtaacaaaaggacaggctcagatgcaacagccaractgcctagagtattcagagcgttagggatttagattcagctgttcatgtcttagttgmtcatagaacaatagaggaaaaactgaaggaaccagaatccagaaccacactgtcttactagggtgaggcagttactttcaagtaaggccagctgaaagtactgggacaaagtccagtagaatgttatataaaataaacctttcaataatagttaatggtcaggggatccaaacagagttacctaacgtattctgaaaggggcgatgatccagtggtgtgtttgttgataagtcagctctccaggcattaaaagcatttcatgatttctttgggttaaatacttctacggtgattaatttccagcagtagtcccactcacaaaattsttgaacatttaacaacaggctattgcaagccagtaagagcttggtccaacataccactgaaagtaaaatctaaggagggagatagcacaaggaagcgttggtacattgtggtgacccttacttgatgggtgcaatgagcagggctccaatctcctggaaagagctggtcaagcaagaacaacttcctcaattcctagagggattaggatattaagcaaatttctaagacacaaatttgggtgcaaagaagtaggcggaagcccagtaaccagattgaggccaaaaagtaagttgttaagactggaaaaaagaaatctagttacatataaaatatcaagtaatataaattagacatcataaagggccttattgttggtgtggagaattctatttgtataggtttatctaaactataaattctctaccattataggcacataattaattataaaagaaacaggcataacttctaaaaatggcaaaagtaagtttatataatagaataatcaattttttcactaatagtggtgtatccgtctgttgaattttgattctgcaaattgttctttagtatgggctgcctaatgacttgatcattacttagctttcttttaattcttttcattatgttaatttgtacgttgcatttcttaatatacttcagtgcctcattaatattaagatctacaagtgtgatttttctgaaaaatcttgggtaaatagttttttatattgaatattttgtttctctctttaccttaccatttctctggagataaatatcctatcttctagataatatatggtataaggtattatgaatcaggctatgttaaaaattcttgtaaaacagggaaaaaatcttttgttacgatgattagagtgatttgattagagtttcagaatgctgtaatataagggcttgaactcccaacacccccccacccccgacaccaaccccccaaamacamacacacacacagggagctagtggtagtaatcaattattgcatattggaagccaggtgggcagaaactagataggtgcttattgcatgagaacaattctgaaagaaataggaagaatcaaagaagaaaaatatgtgcctagtttctactttatttaggatggcatgagctggaaacttgcatggaaaagtagatgttagaaatcagagagttaaaagtcaaaagagcgggttagtaggctccaaaagttgatttgtaagtcactyatttagaactctggatgtatttttcctagagcagcaatgtagctcacaatggtagtccaaaaaacctctcaaagtcctaacctagctgaaattaaatgaagaacctctgagccctgagttccaccaacttctcttaaaactctgatttttgaacccgatccagagctttaagtattgaacctraagaagcctgtggtgccatttatctagaggtgcctgaaggaaatgaggcagaaggtgtttacctgaagcaagcttcctgattgtgcaaaactgagctatgttggggtcctaaatcctagggctatttctgtaacctactagttatgtaaacttgtacaggtaactcaatctgtcagagtcttggttccctgatccatacaagacgaaaagtaatatttaattcacaaatgcacagatagctcaaaggctcctgctaaaccttccccaggctccaaggggatcttaagtgtaaacatgtggggaaattttcttgtttattgctgcaaccccaggacctagaacagtacttcatatataaattcgtttctgttgattatgttaaataaatggatgcatgaatcaaaagtgcttcattagtaaccggtgccttttttaattaattcccctacctttctccacaatcaacagaaatttgagagagtattagcaaagggtatgtcctcttatagtggaaggcaggataatcatggctgttcgatggatgggtcatttgctggctgtgcgtgctttgctgtagctgtttgtatggttaaggtatgactcaggtgcaatactgacatctccctgctacctctccattgtgagtatactctggccaaaatccacctggttatttcttgtggtttgttttttgtgaatccatcacctttattgttatagagggtctcttcaggttaagctttcttcataatacacccatattaaattgttctatgtgatatttctgcttggcgaggtttaatttggtggaatgagagctgcctgtttkttagcagtcagatgtgcataatagccatctaaggtagaattcatcaattatgctgaaatgtttgtttttaaaatgtcaggtgtccagatggtgccatggcaatgggggtcattaaaaatgcttagacacagagagtcttaataaataaatgttcttgttagtgatgcagatccttagcagaggccaagttttttaaaaaggttaataggttaaagtttcttaaagtgaagttwtaacaagcacctcaagatgaaccacaatattactctgcttttatctgttttgtcatttccatttctgtcttctctctttactcttacctgcccatcttcatccaggaattctcccctattgcacattgaaagagctttgcaaaagagagattttatgttaataaagtcagaggatggtgctgttgctatttggagattacctaattaaagacctttatgggtacttggatggtagcaggactgccgttctaaaaggatgtgcatctggagtgattcagaacgcagctccacatgcagcgccaatggtggaatttaaagcaatcaatgaaattatctatactttcaactttgttagacacatctcttgtgcaaaaccattattacagatgctgaagctacacacagagcctccagttacccataaaagcagcatttggacagaktgtaaatttgccaccaggactctggcatatggaaactaatatgtctgatcaggaaatgaaactcattggaatatttacactgcttctcagatactttgaccctagtttagccaggcttttagaaaattgttgagaggatttatttttctttatctgtcaacaccccatccccctgttccacaaagctcaatctacagactgcggtcatcaaaatagaaatctacatttctgaaaattaagattgttttgagcatatttttcttgtttctgtagaatccaccaggcctggctctggtggaaaaacaaagtagcaatatcagttacaaaggactatcgaaatattcccagccatgttaacacatctgtagaggaaataatactgattatttatttttamaagcatacctcggagatattaaaggttcagttccagaccaccgcaataaagcaatatcacaaaagagcaagtcacatgaattttttggttcctagagcatataaaagttctgttcacagtctattgtagtctattaagtgtttgatagcattgtcttaaaaaacaatgtacatatcttaattaaaaatagtttattgctaaaatatgctaacaatcatctgagccttcagcaagtcataatctttttgctagtgcagggttgttcctccatgcttatgactgctgactgatcaggctgggggttgtggaaggttggggtggctgttgcggttttttaaaacaagacaacggtgaagtttgcttcatcaattgcacatcaatttacttttcctttcatgaaagatttctctgttgtgtgtgatggtgtttgatagcattatacccatggtagaatatctttcaaaactagagtcartctgcttaaatcctgccactgctttaccaactaacttgtgtaatattataaatcctttctttcatttcaacaatgttcacagcatctttcccaggagtagattccgtctcatgcaatcattttcttggctcatgcataaaatgcaactgctcatccattaaactttatcatgggactgtagcaattcagtcacatcttcaggctccacttctaattctagttctcttgctgttttcaccacatctgcagttacttcctccactgaagtcttgaacctctcaaagtcatctgtgaggattggaatcaacttcttccaaattccattaactttcaaactattaatgttgatattttggccttaacccatgaatcccaaatgttcttaatggcatgtagactagtgaatactttccagaaggttttagatttactttgctcagatccatcagaggaatcactatccatagcagctctagccttataaaatgtgtttattaaataataagacttaagtgttgatattacttcttgatccataggctagaaaatgaatgttgtattagcaggcatgaaaacagtgttaatctccttacatatttccatcagagctcttgggtaactaggtgcttgtcaatgagcagcaatgtttttamagaaatttttcttttctaagcagtaggtctcaacaatgggcttaaaatattcacggtaagtcatgctgctaaacagatgtgctctcatccaggctttgttgttctattcatagaacacaggcagggtagatttagcataattcttaagggccctgagatttttggaatggtaaatgagtattgtcttccactaaaagtcaccacctgcattagtccttaacaagataaccagcctatcctttgaagaactgaagccaggcattgacttctctctagctttgaaagccctagatgtatcttcttccaatagaagcctgtttgtctgcattgaatctgttgtgtaatgtagccaccttcatcaattattttagctaaatcttccagctaacatgctgcagcttgtacatcagcacttgctgctttaccttgcactattatgttatggagacagctttttttttaaaactcatgaaccaacttctgctagattccaacttttcttctgcagcttccttgcctctctcagacttcatagaattaaagagagttagggctgtggtctggattagtattgaggaaatgtggctggtttgatcttctatccagactattgaagctttctccatatcagcaataaggctgtttcactttcttatcatttgtgtattcactggagtagacttttaatttccttcaagaatttttcctttgcattcacagtttgactagctttttggcacaagaggcctagatttcagctatctgggtgtttcacattccttcctcatcaagcctaatcatttctagcttttgacttaaagtgaaagatgtgtgactcttcctttcacttgaacactttgaggccattataggttattaatgggcataatttcaatattgttgtgtttcagcgaacagggaggtgcaagaagaggcagagagatgggagaatggccggttggtggagcattcagaacgcacactcacatttgtcagttaaactcactgtctcttatgaacttggtttgtggtgccccacaacaactagataacaagagtaacatcagagatcagtgatcgcagactataacagatatgctaataatgaaagagtttgaaatattgtgaaaattacctaaatgtgacacagagacatgaagtgaacacatacttttgagaaaatggtgtcgatagacttgcttgatgaaggactgccacaaaccttcaatttgtaaaagacacaatatttgtgaagcagaaaaaacaaagcaccataatacaaggtgtgcctgtatatctgacttttatttataataatgaaaarttaaaagatagcttaaatgttcaaatagaaaaaatatttgctagtcacagtttgtccaaatgatagaatattatgctgccattgagctttttcacaaataaagaaacaaggaaagaaatgagactctagtgcaggaaactgaggaagaattcttttagattgtttaaacctatttttagtcaggttcattgaggtgtaagttacatacataaaatatattctttttagcatgtaattctgtgtattgacaaacacatagaatcataaaaccaatatcacaatcaagatatagaaaaattccatcaccctctgctatggtccaaatgttatatcccccaaaattcatatattgaaatctaaccccaaaagtattaagtaaaagtattaagaggtagggccttggggaggtgattaggccatgaggctcagcctgtttggctaaaggaattactgtccttataaaagaggcttgaaggagcttgtttaccccttctgccatgtgaggacatagccagaaggtgctgtctgagaggaacaggccctcaccagacactgaatctgctggtgccttggtcttggacttcccatccttactgtgagcaataaatttctgtttataaactacccagtctgagatattttgytatagtagcccaaatggggtaaggcaccccacagatcccttcattcctctttgcagtcaatgcctttctccacctctatcattaggcaacaactgctctgtttgctgcccctacrtttttctttttccagaacatcatataaatgtaatcatccattacgtaacccttgactctggctgctttcatttagtgtattgcatttgacatcctaccatgttgttgtgtgtatcagtagttcatttttgtttttattttttaactgaaaagcattccaggtatggatgtaccacaattcacttatccattcaccagttgaaggaattttggattgtttacagtttggagtgattatgaattaaagttgctgtagtcatttgaatataggtttttgtgagaacctaagttttcttctttcctgggtaaatamcttggagttttgggagtggcatttttaagttgcatataaagtgtatgtttacctttataagaaactgccaaactgtttttcaaaatagcattcctattttgaattaatatcagcaatattttatggttcagtcattccattatgacaactgtaactccttatgatcatttattaattgctacagatatattgtactagaagtacgtttactaaaaggaagagactttgctctttgaactttttctgtaatgtcacattgtgtcagtttgcccctcagctcatggaaatagacttttatacttcataacatggtaaaatataaactagtattgtgtatcctaaatagaatttttaggaaccagtatataacactgtgaaacctgaaacttctgtgaatgagctctgctctgattctctggtaggaaagcagaagccagtggcactctctatgataggggaacccgatttcaactctctgtatgaatgttctggacattaattgatatggaaatggtctcttgaataatgcttattcaagagggtgtagagagagttgtcaaatcctaaagttctgtaagagccccatacaccttcatgtgtcaaactgtaaaatagtgacccactgtggaaattttcaaacacctccataagaagagagaataatgaaagtcagcatcccagcagcgagtttcaatgttatcaatatattgcaatattatattcttaatatcaacttggaggatgaggaaaatgtgattcttttacagtatatttcagacatcatatcactttacttgtgaataggtcaatgtgtatttctaacagataaggatttttaaacatagcataatgccattatcacaaccaataaagtaattatttaatgttacctaattcctagtacaggtccaaatttcactgtctaaaatattgcatttggttgttatatctattaagtttctcctccttttaaaaaaatgccagttatatatctaataaatttataaattttcatgtagagcttctctcattccattcttctggtcttgaacaggtttttctacccccatgtctcctatgtttcctttacttgctcwtatgtcttttacttgcttcaactatggaaggagggcagatttggggagatttgaaaattacaccaatcactgccatttttccccaaatgttgcagaatatctgcaaagttccctttagcttaattttgagcagtaggatataagtagaacaactaagagtatttttagttgcatataagatgaaatccaaattctttagcatgatcctccacagttcagcacaggcttgtgctacctttccaaatttatctcccaatattacccaacataaattcttcactcttctttattcatgctttttcccttgccttccctcactgtgtcactcattacaaaaacaaacaacaccccccctccaaccgtaattgtaattgtcttaatttctgctcaccatcttatctatcctgatcttccattcttggcaaaatcctttcccactgcccttttcttctccctctaagctttctagccacttaattatttcatattctcaaatttattgctctttgtttccctcttttatttgaataattgtcctattgatctcagtaacctgttagagtaaaaattcatttgattaaagaaaccaaataaaagaaacctgttttcattgacatgtactgcttactaagcattgtgctaggcattgttgaaggaactatctacaaacagacctggcaattgtcattaaagaactaactaaatcacatcatagtatgagaagctgaccatgtcattcctttcaagtgcatccctatttggtagaatttcagtacgaatgcaaagtcaaattaagcaagttatttaaagcaataagtgagttggttgagggagggagactgagacagaaagaggggaagatgtttctagaacagagatccttaagttcattgaactccctctccatctagttctactcagcatctttctgaatcttatgtattcttcaaagtgttgcttaaatcctacattgtgggtaaaagtttcctgaatccttccacatgtaccaattcagtgcttgttcacaaaattattgggatgcaacgatgactccctcctctaaatgtcttgaacacttatcaaatattacatttatttcaaatgaaatttttattgtcatttgctcatgtttacattgtgtccctcctgctaggttttataaatgagctgttgtataactcttcgggtcccccagtgtgtaataacaggtgcttaataaacatttcataaagaaagaaaaatttctttgctgaaaagtctgagaaactcttccttcatcaggacttgcatgaataaagcaaagcaatagaattagtagactgtgttgaacagaactgaactcaaaaattctaagatacataagattttcttccatttaagctcaggaaaaatataatyatcttagttgattttccctgaaaattttaggaaaattttgatccaaatatatcattgcattctattagtcatttgatcatatggctcatattgctcagactatacatacattatagacagacaaagaagtagaaacaaacaaattttcaacagaattgttaatgggaaaaacgctacacaaagtagggagagcacaagacattggtgtccattttgtgataatagtagctatagtttgctgtatacatccttataagccaaaattttcacatattttaatcctttaaatttccaaaacaacagtaagagatagatactgttattaaactcattctacaaatgaggaaatagttaagcaacctgtcctggggctcacagcttgtaaacagaggacaatggttctaaccttagagccaggttctctgggccaagggaatggcccctactccatacctatgagactttaaataagtccctatctgtgcataaaacatatgacataaaacataattattcttcctctgattgatttctgagataagattatgtaacactatttgatcaactgtagccatctttggtagttagtcragagaattccaacggctcaggaagacaaaactgtatgtcctgtcttctgtaatcttatagagtgtgttgtaatttgaaagcaaattgcaaaccaaaatcagcctcaccaacaaatatttataggaatgctggcatggaaacagccatattacctccaagcttgatgaggtcttcagtttctgtccctttagtccctctaactgctccttgcacttaagtttcacttaaggcgtggcataatttatctctagtcagaaccagctaacaaaatcctctgataaatatttaagcaaaggactggtagaaaatcctaaatccagtgcaatattttgaaaggtgtaggctcttgagatcactagatttttgagcacagtttgttcaagactcaaagtagccgtatattattttatagtaatcgatgtatcttgaaccctatctcaccataaaaattcatgcctaatattcgttgtgctaaataaccaaacctctagtattaatgagaagtaaaatagaatagccgaaggtcttacagtgacattctctctagagtgagagcctctgagcaaccatcctgctgggaatagtcccaattagagtacttcaaacgttagctaacccccattccttgcctccagtctgcacaccagggtacaaattaacttttaacaaaggttgatcacactctttattttagtagtataatgtaagttatcagcaagatttcaagaatggagaaaccagtgtgaaaaagtctttccttagaaagaagggtgtcaatttggggtgtcactcttacagtttgatatgtttacacttgacattttagaatatttctttccttctatagccattcagggttaaatagttatttccaccagcaaatttgtctgtcataatagtatcatcagacatcagagtccttgtttgggccgccaaacaggagactattaaaggaaggtaaatgtggaatataggataatttgggctataaattcaccatccttctcactctcaaactctttccagaacattctttcttcatttttttcattctgaacaccacaattctatattactatggcaaatgtctcttataaaaataactttaaaatttagtgtttagtcctagctaattgccatttctttagaagtattctaacaaattaggcattgagggacatatttaatttagcatttctctgaattaagacatataggcagatttccaaatcttaattatgaactagcaaatgtataattagctatttaaaaatactattgatctgatggacagggcaaacttaccttctaattaaaattaccctaagaggcaaattgcacagaactaatgtgttactcaaagcctttcaattagaaaaaaattaaggaaaatagttttcctgatccattttgtggcaaatctaagcctctatttacctgtgtttttcatcttactcccacacaaatgaactaggaatatgtagatacacaagtccttcatacaggactgagggtatctggtgctaaacaagtcctcaataaacattaatagattagagttaacggaaattaaataaggcaagggatttattcataaaaatatttactgagcaccttgtagggggtgaaaagaaagtcttacccattacaagggtcacagctgacactcctataacaaaagataggttaacaagagaaaagcacaacaaatttatttaatcctagttttatgtgacatgggagctttcaggatgaagatcaaatgacccagggaaaactatcaaccaactttttttttttttttttttgagacagagtgtcactctgtcacccaggctggagtgcaatggcgccatctcagctcactgcagcctccacctcccgtgttcaagtgattctcctgcctcagcctcccgagtagctgggactacaggcatgcaccaacatgcctggctaatttttttttttatttttggtagagatgaggtttcaccatgttggccaggctggtcgcaaactcctagcctcaagtggtcctcccgccttgacctcccaaagtgttgggactacagacatgagccactgtgcctggcctatcaatccgtttttatgcttaggttcaatgaagtataggcagccatgtagcaatgtgcttggaccaaaagagtataatcttacggcagtagactgacttaggaaacccagaaaggcttctctgttcagattcttcctggcctttctctgaagcattccttcctcctgggtatggggcagcctctctccagaatgggggtcttatgactactatcaaacaaggtacatcaatttctttatggccatctcctacacagaaaggcaggggaaggcgagaataatatttttagtttttttggctggctttggggaaaaggagttctagtttctatgactcacctgagggaagaggtattcttgtttctgtgacttgccatggggcagaatgaggggccagggacaggagggcaggggagggtcagagagaaagagcttctgaggccacttctgaggctttcactttggtattttgttttctgagccccaacaacctactatgtgctacctacacagttgataagttcagtccctgctctctgtgaattacatgttcggtacaagcagatgcacatattctgtaaacctatgaactttttcaccaaatggattatatctcaccatattccacgtaactgatgcagaatcatttaacaatggctatttctaagtgggacccttgctcctttagtgtgttgcaatctctcttctttcagtagatctttaagtccagaggccagttgaatgtggacacagattttccatgtaaacttgtactcttagtgtgcatggaagtacttggagatattaaagttttgtggcactgttaagtttgcttaacaaataccttcttcacaaataatgggaaaagacaagtccaaatgtatccatgttatcccaaattctgattaaatgaggtctagattattatggttttattatagttcattttcaaataagtttctttatagcccttataaagagaactgtctgagtaaatattgtaatttaaaatgtagacgtaaacttatatgggcaattttatttcattttaagattaaatcatgatttctttttaatttccttaatgtttctttttgcaaagcttcacggtttctggcactgtgcctcttaattcttaggagcacgttatctatcttttgagcataaaacaaataaagacataagtaagaatcgcttataatttttttaaagagtgaactttctatatcttaaatattggtcatgcctttccaaaccctttaaaatcagggtgggatttagtcacataattttacagatgaaaaaaccgagattcagtgactgtcattggatgaatgtataaggaaaatgtggtatatatacacaatggaatattattcagccataagaggaattaaatcttgtcatttccaggaacattgacggaactggaggtcattatagtaagtgaaataaaccaggcacagtaaaacaaatatcacatattctcactcatatgtgggagctaaaatagatttcatagagatagagaatagattggtgattactagaggctgagaagcaaaagcggaaggaggaatgaagagaaattggttaaggggtatgaaaatacagttagaggggatcagttctagtattcaatagtagagtagggaagttatagttaaagtagtgtgttgtatatttcaaaacaagtagaagagaattgcaatgattccaacataaagaaaagataaatgtttgaggtgatgaatatccctaccctgatttgatcattacacattgtgtacaggtatcaaaatatcacatgtgccccccaaaaatatatacaactatcatatagcaataataaaaaaactgagacataggtagttgaaatcctgagtgtgactcaaaacaactactaatattaattatgaaattcatcggaatattattaaaagaacttatgtaaacatttgtatagtaaagaataaactgaatctagctttcccaattctgaatgcgtcaatttacattcattcatgccaattttcttctgaatgatatctctaaggactgacattacttctctggaacaattctgtgtagaagaaaagattggtgtctccttgttttcaagagaaaagcacattaaatttccaactaacaccacaacacagacaaatgaaaacaaacttcgtgtaatgaaagagacacaggagcaaaatttaattcttcccataaaacaatgtgttgaaggagagcctaaaaaaatcgtaatgttaatgaaaatggagggattacactgttaaatcatttctatgtaaattaatagaagagatttctttttggaaataaagcccatcaacagaggaactgctaaaacctgtttttatctccagtaacataaaatttcaggtcacatcaacaaataaagttattaaatcaagcattttattatctgaccctaaataatgaacactaatcaaagataccatccatagctttgattattaaagccaggatttcttacggtttttcttaaagaaaaatagccctaatagatgtcactgcarcaattgatgggagttaaagaaacagattaattggactccatatttctttatttaaacatcttaaatacaattatgcatggccaacggtaagttaatcattttatttagatattaaatgacctgaaattgggttttttatgcctttactcagccaccaatagtcacactttcttcagtccaagaggagggtgtgggtactatctttgatttttattttataatatgaactacaactacctccttgaaatgccttcctatcttagctgtcatatacctgtactattcttgggaagcatctacatttctaatctctctctctctccccaacttcctccttacatctcccccggcctctctctcccttttgctttcactccacttccctcatatttctaccattattgctccatcttcagctacctgttcctctccacagtactctttacaagggtcattcagccttatagctttaactattgccttcaaactgaggattcccaaattagaccttcagtcctgatttacctgtctttcctttatattagacatttccaactaaatatatttatcacagccatttaaattttgtttatcttcttcctttcaacttctctctgttgcacaatttcaacttcattcaacttcattcttaaaggctgatgtggtgctacccgtgttaaatgacttccacattcattgtgttattgtatatatcaccccaaatctaaaccactagtccacataagcacacacatacataaagacccacaaacgcattcacacattagcacttaatatttcacctggcacatatcatgtgatcaaaaattttggtgattgggtaaaacacacatgaacacagcacttttctttctcttctctccaaatgattaccaccacctattgtctttatgcctgttctaaaactgcaaaaaggaatgaggaaagctaagatggagctgcattagcatagtaatcattgtgttaatgtactgcaacgcatgctcctgctggaaatatttgtgttaaaagatgctgttaagaaagccgaaatcctgaaccctaatgaggttcattctccacccaccacacatacccacccacacactcacacatacctttcaccctggccaatcgtctcacatctggtgaaacatgtcagcagaaacctaatgctactaatgacaaataaatatataataaatatctttcctgtgatagtccttttagtaaatggggaatacacttcaagcttaggttattttgacaacatgctacaggtggatgaattccagtgatgtcttaaccttctaagagacatgtgtttatggtttatttattagtgaccatctttgggttgcaaataacmaatataaaccaggaagcaagcaattcacaggaaaagaaattttaatatgtaatacacacataaaaatattcagcctccttagtcctcagagacagacaattgttaaagtagtacatcactttcaaacaccaaataatgatgactgaaaaaaaacttcaataactgcaagagtggcttgagatgggcactctcaaactctgccagtagaaataattcgtttgatattagcatgcaaaaacatttaaaatgcttacacatttgtatctggcacttcccaatctagttaatcaggctaaaaagtgagcatatatttttcaaagtttttacaaaatttgtgttctaagatgttcaccgcaattatttatgagggctaaatataggaatggttctaagtattaaaaattgtcaaaacataagaagggatactgtataactctatatatttattttaaattaacaaargtagatttttatgataaactgttgaatgaaaagtaaagatactaaactatttatgaggtatataaaataagaaaaaaatatgacatatatgcatataatatatatattttaaaacacaaaaaattatacaaaatgaaaacaactgttaactcttgatttgtattttagtggttctgttttcttctctacatttttaacccttctgcaatgattctacatcacttccataaataaaaaataatatctatttagattggaaatgaagtcaaagtgtggatatgaaccatcaaaaaacaataatgtttggatttcttctggagagttcatagacagttgagaaacagatacctgtagcaaaatcaaaaactgttctgcacccaactcatgctataaaatctagtttaagtgcagagcttgcactgaaggttggtattactgcacactaatccatgcataactgaattatcaaggtccttccaagctttttccaacagactcaaaaagttagttttataatttaaatcaactactgtaaaaaagcttttatagctaatatttgatgaacacagtagattgaaagaaataatggaaatgatagagcaaaaatgtatattttagctaatggaaaagaagaaaagtaattttgtttttcagtggatattttcatgagagtttgctttaattaggtgtgcatgaacataatcttctaaccagtattttatttaaaagaggcattcaataacttcattaacctcaggctataggtgcacaatatattgtggaaaataggaaatttaatcaaagcatatataacttctcatagacgttgggttctggaaacagcaggaaatgtatcccagctttaccacctaacacctgtagaatcttttttttttttttwgtaaaaggcacacaaattttatttacatgtccaaggaaggaaccactgagtgactatccctgygtgtataatcttgagcaaattgctcaaccatactgtatttagaattgttggaagattaaactctttaaataagccaggttttcagaatgaagtaggacccacagtaaattccacacgaatgttacctgtcattgcttttagctattacaacctgtattaatggatctatgttggtcgtggttattcaataatttattaaaggttaagtatcagaatgtgttttaaataagttgtagcttcattacagtatatgagacataaaaatttttatattgaataaagcatccaatcatctagttctgccacaaaatagtatttatcaacaacatttataaatgcatacatatgcctagtatatycttggtatgtaagatagttgttctcctaaaaacttctgaaattctaaacaatatgtatttcaaatctaaatttttaaagtaaatatgctcatatttactgttagcatttctgatcgcacaagaaataaactgtctgttgcgagatgtttttctttcagcccattgaactagattctaaaaattgagcttgcaagaaaggttagaattaaatggatcaaaagtaaattttcctccaacttgattcaatcatttccaaagcccaaataaaatgggtcctgagcaaataagattgtaaacacaaaaccatcaaatgagtgacttagtgtactccatggtagaaaaaggaatccatgttaaaagaattaaagagattttatgtaatatatgattcccacatccaagctttgtaaaataaatgcttttcagaggtacattcttatcatagataaatttcccaagtggcaccataaatactgggctactacataaaggaccaagaccaggaagaaagaaaacagttaaactcaaggctgcagatgacttctgtgacaagagtgagaggttaacttgccarctgactgaatctatttctggaattagcctaatgtgcctgagaagtcagaagaaaaatggattttaccactgcttccttgcttgtgcttctagaagtcgtctcatcccaaggaatttattgtatgtttcagaacagctcataatttaggtttcaatttccatcagtatgatgctttataattttgtgttaagcttcaaataatttaaatttttttatattgatatatgtggagaggaagcataactatcaaaattggaggttcttgttattaaagattcatcgtacttatttattttttaaaaaacaattcatttctgttctttacctttccgcttagggcacattttatgatccaggtttcattaaatgccagtaattgtactaaaaatttataaaatgtttgaaagtagattgataaattaaaattttaactttaataaaaactgtatttaatacatttaatatctcactcaataaaaattacatgtctttgtattgtttttatgatgtcactgcaattaggacttaaaaaataggctcttccaatatacacatgtagtttttaaatgatgttctatattaagtagaamacacacatactaaatatacgttatagtatagaaattgccactatttagaaatatatttgcagtgtaagaagttcatttggaattttaaaatattggtcttttgatctgagtgtatgactcagatataaaacttactaaaaatatgaattaatttctttgaacctctttttcacatgtaaaaaagcaatgataatacctagattagatagttatagtaaagatgagattaagaaagtatataaaattggctgggcactcatgcctgtaatcccagtgctttgggaggtggaggtgggaggatctttaaggccaggagtttgagctcagccttggcaacataatgagaccctgtctctacaaaaagtaaaaaagaaaaaaaaattagccaggcatggtggagcacacatgcagtcctagcttccctggaggctgaggcaggaggattgcttgagcccagaagttcaaggttgcagtgatgtgtgattacactccagcctgggccagagagtgagactttttctccaaaacaaaagcggggggagggggaagaaaatgtataaaataaataacacatttcctaaacacaaaaaagtcacttaagagaaaacgtattgaacactaactcgggttgagactcttgctattactacaggaaaacataagaggtaagggtggaaaattataaattgagtatatttttgactggcatcagaggtttttttccctacttatttgacattgtcatctaatataatttctagtgaagcattttattttcatctgtatctcttcaagctagaataactcaatgaaattttcatgatataaagaaggttgatttcattcacatccaggtaggttaattttggccattctaattattgctaatcacaatattactagtgtgatgaaaagccactaaaatgttaaataactyatgatgaaaacagactaaagaaaaaatgatttatgaaaaaaagaaaaagtgtatcccatcaaatagatttttttccacagtacattaaagagtaatagaacatggtatgattcaactcattgttaagtgaggttaattgatgatccacttcaacaatctcaaatgtcagccctagagtgtatccctatgcagagagaccacattatcttatggaagctacattattagccaaaaacataatgtttgctgggtartgatttacatgtgaatagtctcaaaaaggagcttctgaatataagcagttctgaatattgtaaaaataaggaaaataaataatatttagctatatttatattctaaagacatgcaggttgctaaatatgaattgataatctagaaaaagaaaatagtgaacttgcagataggaatgaactagataggtgagatagaagtattttagaaaccctttatcccagaagttataaaaacaaatttataakatgatgattgtggagttttttatttttttttctgtcctttccctttaggtcatattttcattctctttttttttttttaagtaagattcatacttagatgccatatttgaacactatggtacaaatgtggaagaatccatttacagtgattaaaatgctgatttcagtattgaattgctggggaagcattcgcttaagataaaaagttattcttgttgggaaaacagagagaaagacttcccttatgagacttatagagggaaataaatgaagtttaaaatctataaagtttatgccctaaaagaagctaacgcatggtctttggaacaaacccagagcatacaatggaaggagagtttatataatttctacaatgagccattggaatacgtgcatttcaatgaaataccattcagtactaagtcaatcagatcacatgtgtaatttgataattgtgtagtaatattttcctcttttaacaatgtgaaattattaaattcagtgtgttaatttcactttgaaatacctctattttcactgccattcacttcttgacctttttcttacttttgtccctattaagttacaaattttcttacccataccttaactttcatttatagtaagtcttttaaaaagtgatctaccttttgctctggcgagattaaatcatcctagagagtcagtggaaaatcaacagaaaagagattccaaacaacaaaaagacaaatgatttttaacattattttgccattctatttcttccttctagcaagagaattttattttccaaatttgtagaaaattagaaagccaaataatcacattgcctttttgcatagtattttgcaattatattatgtatagtcacatatattatctcatttagtcctcaaaaaaaaatcctataaggaggagaaaaagaaattgaagttcagaaatggaattctgtgtgcccagcccagtctcctttttkgctcatacattttttttctagattagctattatttattgtattaacagaaaaaataagcactgggttgccacatacagttgcaccactttcactccacaaagattcctagccaagtagatgatttgcaaatgttttcatgattcttttcaacttattgaaaatccaaatccagtggctccatggaactcccttcagtgtaaacacttgactttactaaacgatacctacttaaaaaaaaatcagactaaagaactgaatcaaatggcaacatatgttttggaataatttctagcatattaacaatcctttatttagtgtgtagacatccccttaaattaaaaacttttyctaaaaataattatgatcccactaataaaagcagtgaaataagtagtactagcttctttttttttaatctctatgctgagctctttattaggtatacagcagatgtgttttcattgaagaacaaaatacattttataaactgattttggtgacaaataaccccaatattagatcagcatcctgaaagcactgagcttttgaaaataaaagaaagataagaaattccgttagcgaggtgccggagacaagtaattcagcatgctgctcaaagattatggggagctttcagcttcaactcctaggaggcccatactcataatgctgaggctgatgtcaatgtcagttttatacccattatcttcatgcaaatctaaacaatggaattttggcctgaaaaaatgcatatgttatccrttcatggtctcttttatttcctgtttggaaccaccctttgccctacatgattcataaatstacaccrtaagtccccagggattggctttgagaaatagctataagcacagaattcacttttggaaagtttagcctctatcattcaaggtagggatttggggctacatatatttatgatcacattgttcagtctcttcctaatggaatgccagagtcatttctctaatggaaaaattccatctgtttaggaaaatgtaactctcagtttgtccttggggaattttctgagataactttaatatccttgagaatgttgataaaatttctagaaacctaatgttattttccaatagactttttaaaaataaattttattgtatgtatttaaggtttgcaatacattattatggatacatatagatagtaaaatgttactatagtgaagcagattaacatatctatcatcttacgtagtttctgtttttatgacaaaagcagctaaaatctacttatttttttaaatccctaatataatacaattttattaactttagtccacatgttgtaaattaaatctctaaacttgttcatctacatatctgctacattgtatcctttgtcccacagctcctaatttcctcgcccccacccccactgatgataaacatggtttcactctctatctctgtgtatttgacttctttttttaaaaaaattcacatatgtgagatcatgcaatatttttatttatgtgtctggcttatttcacttaatgcaatgtcctttaggtccatccaagttatggcaaatggcaggatttccttctttttttgaggctgaataatattccagtgtgtatgtgtgtgtgtgtgtacacacaccacattttctgtatccatttgctcatctacagacatttacgttgtttccatactttggctactatgaatattactgcagtgaacatgggagctcagatatcttttcaaagtggtgatttcatcttctttgggtatatrtccaaaagaggaattgctgtaatttgtttaggaaggttcatacttttttccataatggctgtaccaatctctattcccatgaacagtgtactaatgttcctttttctccagtcaccaacatttgttatctcttgtcttactgataaaagccatccttatggttgtgaggtaatatctgatactggttttaatttgcatttccctgataattagtgatgttgagcaacttttcatataattgttggccagttttatgtctcctttggagaaatgtctgttcaagtcctttgcccatttttaagtggagtcatttgtttttattctattgcattgtaagagttctttataaattttggatagtagtcccttatcagatatgtggtttaaaaatayttttttccacttcataggttaccayttcatttggtgattattttctttgytrtgaagaaacttctgagttcgatgtagtttcatttatttttgcttttgtagcctgagcctttggtgtgatatccaaaaaaaaccattgccaagcccaatgtccaatagacttttatatcatgatattattatctgttaggtttattgttcagttttttaggaatacttcagagaacttctgaatatttcataataattttgttagctataaatgcttttaagaattatctaaaattatctaaatttgaaaaataatcttttgaatttaaacaacttcaggcttgcctggtgtgtgcctgtacataaggaactgaactgcttttaacctttaaaaagaaacatacaagaaatgaattacaagtttgggtctgttgccaaagttgagatttttcaacttcacaagactctttaaagtaaccatgactgtaaacattaaaaaaagaataaagatggcagcctcattggattcaaatgaatgtcgttcaaagtcaactctaaataactacatgtgcattgccttgcaaagtgttagacgttttcaggaatcattagcagtaaagtgaagcaggtaagatatagtagcttttgcttctctaaaatcaggtccttttcgttttctgagcctcacttagcagcattacttaagactccatgtggcaactactatttcctccattgttccttgtgtctctccctccaaagcagtattgccgtccaaggctatgtaggttatacttgtgcctggcacaagccaaggtggagaagtggggtggtggggagtaagtttcagctccagcttatgctgcatccacgaaacccttaccctgattcaaggctgcgtgcacttggtcatttcaccagctaactctgataggtctgagtctgcctaaagagggcgcctttctcaattttgcatagaggcaccctaataatgctgactccatgtacctaaatcttcctcatagtttcccaatagttcattccgtggatatttattgagagcccaatatgtgaaaactaccaggctaagctttacaaagtacaacggtgggtacttagtgcagagcatttgtactccagcagaactgataagggacttacacagtaacaaccataatgccagcagaaagtaagttggcgatgaagaatgttgtccatgcatcagctgaggccttgctaccctttgagactgagataaatccagcttaggcttcttattccacattgtgtgggaatggcaaggacctcccttccccaaaatttacgttaattacttaaggcttatggattcaaattcactctggcttccagtttctgtttccttggaatttcatctcctacttgtctcatctcctagaatgcttttcttctttcttctccctgccaacactttgcttggattactttaaatccaaacaaaatgaaacaccccaaggcatttatgcatgtaaaagacaacagtataaacaatttaaaattgaatattggatatttgtaactgagagtattttactggccacctttctctgtaagacctgctatattacgtttttccattacattttctacctccctcagtctttcccagccctaaatatctcctcatttctttgataagttaatttaaaactctctttactgtctccttccaagatatgcccttggcacctcactttctatctctaagttgtgtaccaggggattcttctaaacaaagggacaaytgaggactagcaaaaaaaaaaaaaaaaattctccttgttacagaatagtatagataaatttttatgaattattaaaatagagagtaaaatttccttgggatgacatttaaacaaaacctcgagggttcaagatgatgactgtatgacaagatagaatgaaagggaacttttcataaagaattgatagtttcaataacagcacatagagcccttatgggaaacagccaataatttagtttaaatgaggcataggttaactaatgtatgaagagagctagaacaagataatttagaaatactaaatagaaccagatcatagaggggagaatatcccaggtcaggactttaagagatcttggaagcctttaaagtattttgattagggatgataggatccaagttatgctttgaaattgtgaatctggcaagacttagtgggataaattttgcaaaaggttaaaatttgaagacggtaaattagtcagttaaaccagcagagactaatagaggcccgaatttttgaagttgctgggaaaatagaggaaagagaatagatatcagagatattaccagcacagaatcgacaggacttggtaactgatcattgatggatggttaagaggatgcgtaacagaagatatctcaggagaagcaagtttgggaagtgatttaaagagttcatttttggatggctcttttttgcagagccaaatggccatcttggtagaaatgtccaacagacaaatggagaagtagaactgaagctttgaagaaaagtcagggttagagataaaaataggaacatcatcctcgtagaaaaaacagcatcttttccttcaccttaacaggcaagtacagtgtactgctttaaccactccaaaaaatcaacaatatccacctccatttaggaatactctccaattacgttactctgagaggaaaatatttaaaattcacatttggctcttaaaaatcagactgtagagaggatgtaaggaaaatatgaatcaaatgttatcaatggttagatttcccagtacagaaaaagaaagaacacaaggccaaaattgaattagacaaaacttttctttacactgacaatcttatgcaattgttttaagtctaggaaatacttgatgtagtccagattaaacaaatacttgtattggctgtggaagcacaaactttatatatgtttttccattttatttactagaagagttgctaaaatggacttctaattattatcactcagataatccttttgcttattaacttggcacagcaaaagaacatatgaagcctagtgtttgatagtggttaccaagtcatatttggaagtattaattaggtcctagttctatcatgaactaggtcacttattccacaaacatttcttaataactatgtgcaaaacactgtactaattaccagagaaagattcaaaactaacagtagtgattaccctaactatcaaatagtttaaacacaaacaatatggtgaactttccccagatagggcaaaagatagcaagggtgcagaaaaagaagggaagtgaagtgagatataatgacattcacgtaaatcctgcatttattaggactccccagaaaaatacttagttgtatcctgaggaaatatttcaaagtgaaggcaaaaacgtatcatcttacagatgttttacrgtaatggcaaagtggaagcaaattaaatgtacaactatgagggattacttaaattaattacaacatatctatatattattaagcaaccaatgaaaatcatgtttttgaagtacaaatgctgtcatgatataatgctaagtaaraaagctagcatagagaaaatttatcatttaatatcaattttggatgtgtatatrtatatacaaatatatatatatatggtttctcaatatagttttctgtaatttccatcttttctgcaggaaatatgtgagatttaaaatgttttaatatatctaaaaagtatcagagttacatatttatccaaaatgtttattacactgaataaatacatacatcaagataagtaattttatgaggcttactcatagttcaatgtttattctttgcagataggaaaaaactcagtcctttcctgaaattgtcattaatataacattaatttcagatttcaaaaaacatatctaaacattttgaatatttttactatataccatgtaattaaatagacaaggtagatcttccttttgtaattatatgtacatagagattaaatgaatcaattatttcttttcaatggaataatatattaccagcttcacacaagttacctaatcttcctaggcctcagtttcttcaactgaaaagcagagttaggagtacatagaaatgttcttgaaacaaagtgattgtttaattatcattaggaatcaataacatcatcagtatttttactttttggtatctcctaatgactaaaattgtttacatgggtaaagtagaagtttatttacacacaagaatatattcaatatgtatccattcccttcatcatgttatcaaactactttgataaacagtctctgaaaatcttttttttttttttttgagacagagttttgctcttgtcacccaggctggagtgcaatggcaggaacttggctcactgcaatctccacttcccaggttcaagtgattctcctgcctcagcctcccaagtagctaggaatataggcacccgccaccacacctaggtaatttttatatttttagtagagacagggtttcacgatgttggccaggctggtctcgaactcctgatttcaggtgatccacccgcctcagcctcccaaagtgctgggattaaaggtgtgagccaccacacctggcccaaatatctttcttggtgcatagggtatgttaatgtatattagtggtatatactattatatactaatagtatatactattactgtctgcatctttattcttttaatgtgattctaaagtcggttatagatgacatagagtaagcaaaggcttaaagaggattaataaacgtaagyagtatacatggtcaattcagataatccagtgaagggaaatggccattcctctactgatggcaacagatgccatcctgaaaatagctccttggccttcraaaagtagcacattaaaaggagcatatcctagatgatgggttgatgggtacagcaaaccaccatggcgcatgtatacctatgtaacaaagctgcatgttctgcacatgtatcccagaatttaaagtataataaataaaataaaattaaaaaggagtatacccaagagttggtacactagtagaactgtratttttttaaaggcaatttctgacaaaaacaagcaataagraaaagattccctattcaataaatggtgctgggataactggctagccayatgcagaagaatgaaattagatctttacctttcactacgtacaaaaattaactcagaatgggttaaagatttaaatgtaagacctcgaactataaaaatcctaaaggaaaacctaggaaatacccttctcaacatcgaccttggcaaagaatttatggacaagtccccaaaagtaattgcaacaaaaacaaaagttggcaaatgggacctaaagcacttctgcaaaacaaaagaaactatggacagagtaagcagaccacctacagtatgggagaacatacttycaatgaatctgacaaaggtctaatgtctagaatctataagaaatgtaaacaattaaacaagcaaaaaacaaccctattaaaartgggcaaaagacacaaagaagtatttcttaaaagaagacatacaagcagccaacaaacacatgaaaaaatgctctacatcactaatcatcagagaaatacaaatcaaaaccacaatgagatrccatttcacatcactcagaatggtgattattaaaagtcaaaaaacagcaaatgctggagaggctacagagaaatgggaatgcttatacactgttggtgggaatgttaattagttcagccactgtagaaagcattttggagatttctcaaagaacttaaaacagagctaccattcaacctagcaaccccattactgagtatatacccaaaggaatatagatcattatactaaaaagacacatgcactcatatgttcattgcaacacaattcataatggcaaagacatggaatcaacctaggtacctatcaacggtggattggataaagaaaatgtgatacatatgtactgtggaatactacacagccataaaaacgaatgaaatcatgtcctttgcagcaacatggttaaagctaggggtcattatcctaagcaaattaatggagaaacagaaaactaaatcctgtgtgtccgtttataaatgggagctaaacattgagcgcgcagggacataaatatggaaaaaaatagacttggcagttgattagagggaggagagaaggaggagggagtgggttgaaaaactacctattgagtattatgctcacaccctgggtccaatatattcatctaacaaatctatacatttgacacctgtgtctaaaatcaaagctgaatatttttaaaaggcaatttctttaatttgaatcataatgcacatacttctcaataatatctttcagctatgaaagtgtttttttttttttctccctgggggcagtcaatgaagagtaatatgcctgcaaatgaaagcagaaagaaacttaaattttatctactagtctattaaacrtctctaaaacattgatccacycaaaaacaagttaactagaataggaatgtgtttcctagttgaatgttgtcaccatttatctatggcacatatttatgtctcaggacagcttgcaaaccttggtagwtttccattcattaaatgttcttgggaaaaatgtagattaaaacaaaagtctgtacttggttataagcatcactaggaagttttcaacctgtcttggttttcagttttcttactgaaaaaggaaatcctttgcatccgtgaagtgyttttataagaattaaatgagataatgcatattaatatcaaggttattgactaacagtcctcaataaatattcacttccatttmatttgttcttttctttcattcttcccttcctatctcctttccttccctccttccctctcctcttccctttcttctttttcttctacactaattcttcctaattgtaaatgtattctaagacaattagtatgtatgtttgattcatttaaatgtcacttttggggaaatgttaaatgtgacttttggggaaaaatcctttgaatcaggatgtgttaacgtcttctttgcgatatttttgtcattcttttgtattttattcatgtctaatagagttattgaaaagtttctttaggaaatgttatcagtggctctcaactaaaatttaacatgcatttattaaacaccagtcccgtattagtctactgaaagagaaagagagacatatcaagaacgcatattgtaaggtataatatcatagatgcatatgtgaggttagttggtcattgggtgaggtaatgctatcagaactgtctcctggattgagttctttcatgttaggccatttaaatatctttttccctctgaactagcctgccacagaattgtatgctattttaaataatttaaattttgtgataagagtatttaaagtaaaagaggtatgcaatgagatagtatagcttgattcaaatctggtgtaggaaaatatgaataatatactttaatgaattatcctagctctgccacttgcaagctgtgtgattttagaaatggcttattcttctggccttatttttsttatttataaaatgagaataataatagtagttacttttcagatttattatcaggattaaataaagtaatatatatctaattcttgccacatattaattgttcaataaatatttaattattattaatattattattgtttgacttcattgtctgtcatctcgttagrtaggatgatttccccatacaaattttrcaaaagaggaaacttcaatagtttgccactagaatctaaacatgtaattatagatcatrttcattgaactttaactatgtagcagacctcatcctaaacacttacctatatcaattcatttaatattcacaataactttgtgaattaggcataactgtccttcccatctcacagataaagaaaatgaaatacaaagaaatcaagtaattacaggagccaggctgtgaactcaagctcaagccagtatttaaccactgtattatattgactttgaacaggcagsaaggttttggggttttttttaatttctcatttttctcaattgtggattatatgtgtctatatcttggccagctraagtatgtctttggctcatgatattcagtaaagacataaattctaagttaacttatatctaataaagtatttcttgtttttgtatataataacaatttgactcaatataaattacttgggttaaaatgttcgttgaaaattacatatatttgcaaataatgtgacacatttgaagaattgttttctaacattttaaagttatagaagaaaagaattgtgacagtttgatatttgtttctttgttgatatcctgaatttctatgaaaatgcttttaggctttttaaaaacttttataacttaaagatttcaytagaacatatctccggttaattctgtgttttttgtttggtttttgttgttgttgttttgttttgttttgttttgttttgttttgtaaaatgcacactcaaagctctcttcaactcagaagtatgtcttcagatgagctacctgtattgcatcttttagttttcttccatgtgttttggttttattttgtcctgctttatcaaaaacaactgaaaattttgcttgaacttagattttctgtttgttaggttggttttgaaagagtttctaaggtgttgacctcactgatttgagtttttgtaatgtcaattttatgtgctctgaagcagatttttagttgtaatttggggtttttagtggttttttcttttctccacttctatgtcttttttaatagcttattgtttccttgtctctttttgctgtctcatagaattcatgaattcttgtatttgattatcacttttaaaaataattttctgctgtttccttaaataaacaagttttagatggttgactttttataatcttttggatgatggactctttctttggttttgcagaattttttcacaagtcaagaccaagtttctttctggttattcatctttaaacagagattatttagaactcactatttttgaaaagatgctattttcagctctactgtgtagggctgtcatagtgtttctgcagatatacagatgatatggcttatgctcttttatttaatatgtaaattatgctgataagcccatagcactagcctagagaatgagcaagaacactcatgctcaaatttgcctaatatatattgtttctagacaaaaataataaacgagtctagaatttctagttataaactgaacacatggcaactccacataccctttagttttaaaattgggtggaataagtacctaactcctagtccaatttcctgtatctcacaaacactcatctagtggtttctacttgagataaatactaatyttcttttacaccttattacattctcataacacaccatgctttcatctatgatgacactaatcaaaatagtaatttaaaaggcaatgttgtaattagtagttggatatctatctcctgctttagaatgtaaactctataaaaagtctgggtcttttgttgattttgctttcttattacttttttatacttttcttgaccctaggggcaaaggtatgagatcatactcctcattctgatggctcactatcaatattggtcagttttatttacccatcgatccatccatttatttattctcttttttcttcattccccattcccatttctctcccctaatagccaatattctaataagttttatttgcatacttttttataaaacatagaactcattctgtatcttatttttgttcagcattgttttgaaatttcatccatattgctggatgtatgttacctttgctttgatctgatttatagtcttgtataatatgaaactattacatttacctagcaagctctaactcttcaataacacaaacaatgtactaatgaacttctgtgcatatgaatcctttcatatttgaggaaaagtttatatggaatatatgctcaggagtggctttgatggtcatagtctgtgcatgttctgaatttgccaaaggactgccagatcattctccaagatggttgtctcagtctataacatctacaggaatttgatgagggcacctgtaaccctgccaacacttggcacgattcggctttttaattttcgttaataccatgagtgaaaagtgatgtcagtgttttagtttctgtttctctaacgatatgaatttgggcatcatttcattataaatggttttagagggaggaatgggatgaggaggaggagtggttccttttgtttattaaatgtccattatgtttgcttattttttaatcgagttgctatcttcttcttaattaatcggacttgcttaataatctaattataaatctcttgtcagttttagacactacaaattaaattttctctaccaagctatcatctgatttttgtgaactttttccattcaatcttcagtgaataaaaatctttaattcttattttacaaaatccattctttctttgtctcaatgatcttgctttttggattttgtttggaaggtactttctcatatctatgtcacacaaacttactgtttaatttataattttgcattgacagtatagtaattaagacaagggatactgaaatcacactatttggattcacagtcttggctccttcacttactaatccagtgaatttggataacttaacctttaaataacttttcctttgtgtgtaaaatggggttggtagtactaatgaacccaataagattatggtaagaactgaatgaggtaatacataaataacactgagaaaagtgcctgcctgacacatgaaaaaatgcttatcatcactggcgatcagagaaatgcaaatcaaaaccacaatgagataccatctcacaccagttagaayggygatcattaaaaagtcaggaaacarcaggtgctggagaggatgtggagaaataggaacacttttacactgttggtgggactgtaaactagttcaaccattgtggaagacagtgtggcaattccttaaggacctagaactagaaataccatttgacccagccatcccattactgggtatatacccaaaggattataaatcatgctgctgtaaagacacatgcacacgtatgtttattgcagcactattcacaatagcaaagacttggaaccaacccaaatgtccaacaatgatagactggattaagaaaatgtggcacatatacaccgtggaatactatgcagccataaaaagggatgagttcatgtcctttgtagggacatggatgaagctggaaaccatcattctcagcaaactatcgcagggaaaaaaaaaccaaacaccacatgttctcactcataggtaggaattgaacaatgagaacacttggacacaggaaggggaacatcacacaccggggcctctcgtggggtggagggagggaggagggatagctttaggagwtatacctaatgctaaatgasgagttaatggatgcagcacaccaacatggcacaggtatacatatgtaacacacctgcacgttgtgcacttgtaccctaaaactttaatttaaaaaaagtgcctgcctgtacatactgagcattgtataaatgttgctgttatgataaataacatacgtatatttcagtaagaattcagttttattttttgcatgttatgaatcattttcaataccatatactaagtgactcattaattttctattgttttttgataccacgttcttagttattgacctccaagattgatttggtgtrttaattcgcttaggataatggcctccagcttcatctatgttgttgcaaaggacatggttttyatttttttatggctatgtagtattccatggtatatatgtaccacattttctttatccagcccactgttaatggggcatctgtgctgatcccatgtttttgccattgtggatagtgccacagtgaacatgcaagtgcatgtgtctttttggtaggatgatttctttccatttagtaggatgatttgttttcatttcatatccaatcaaataatgggattgctgagtcatatagcaattctgctttaagttctttgaggaatctccaaactgctttccatagtggcaggactaatttacattcccaccaacagtgtataagcattcccttttttccacaacctcaccaacatctattgttttttttttttactttaataattgccattctgactagtgtgagatagtatctcactgtggttttgatttgcctttctcttatgttagtgatgatagcatttttttatgtgtttattggccacctgtgtgtcttcttttaagaagtgtctgttcatgtctatggtccattttttcatgggcttatttattttgtttgtttgttgttttgttgtttgtttgtttgtttgtttttgcttgttcaattgtttaagttccttatagattctggatattagatctttgtcggatgcacagtttgtgaatattttttccccttctgtaggttgtctgtttactctgttgatagtttcttttgctgtgcataagctctttagttcaataggtctaatttgtcatgttttggttttgttgcaattgtttttgaggacttagtaataaattcttttccaaggctgatgttgagaagggtatttcctaggtttttttctaggattcttatagtttgaggtcttacatttaaatctttaatccatcttgagttaatttttgtatatagtatataggggtctagtttcattcttctggatatggctggccagttgtctcaataccatttattaaagaaggagtcctttccccactggttatttttgataactttgtcgaatatcagatggatgtaggtgtgtgactttatttctgttttttgttgcttttttttttctcttccactggtctatgtgtctgtttttgtgccagtaccatgctgttttggttactgtagacttatagtatagtttgaagtcaggtaatgagatgcctttggtttggttctttttgcttaggattgctttggctatttgggatctttgtttttcaatatgaatattagcagtttttttccaattatgtgaaaaatgatgttggaaatttgataggaatagcattgaatctatagattgcttttagtaatattgagtcttccaatccatatgcatggactgttatttgtgtcatttatgatgccttttagcagtattctgaagttcttcaatttcacctccttggttatatgtayccctaggtatttttgtgcatgtgcagctattataaatgggattgtattcttgatttctcttagcttcatcattattggtgtatagaaatgttgcttgtttttgtacattgattttgtattctgaaaccttgctaaaattgtttatcagttctcatagtcttttgtcagagtccttagggttttctaactataggatcatattgtcagtgaagagaaataatttgacttattcttttcctatttggatgccttttatttctttatcttgcctaattgctctggctasaacttctgatgctatgttagatagagatgatgagaatgggcatccttgttttcttccagttctcaaggggaatgcttccagtttttgcccatttggtataatgttaactgtgggyttgtcatagatgacacttaygattttaaggaatcttccttactttaaaccaacaacagcaaaaaggacaaagaagggcattacataatggtaaaggattcatatcaacaagaagacttaactatcctaaatatatacacaaataacattggagctcccagattcataaaataagtatttctagaagtacaaaaagacttagccacacaataaaagtgggggacttcaacacttcactgacagatcagtgaggcagaaaactaagaatttttttttttttttttctgaagcagagtattgctctgtcacccaggctggagtgcagtagcacgatctcagctcactgcaacctccgcctcccgggttcaactgattctcctgcctcagcctccctagtagctgagataggcatgtgccaccacaactggctaattatttttttgtgcttttagtagagaaggggtttcatcatgttggccaggctggtctcgaactcctgacctcaggtaatctgcctgcctcggcctcccaaagtgctgggattacagacatgaaccactgtgcctggcctaacaaaggaatcctgaacttaaacttgacacttgaccaactggacttaatagacatctacatgcacccatcaccatagaatatatattctcatcttcacaaggaattaccccaagatcaaccacatgcttggtcataaagcaagtctcaataaactttttaaaaaatcaaaattataccatccatactcttggacaacagtgaaataaaaatagaaatcaataccaaaaagatttctcaaagccacacaattatatgcaaattaattttttctgaatgacttttggataaacaatgaaatcaaggtagaaataaaattatttgaagtaagtgaaaacagagacacaacaaaacaaaatctctgggatgcagcaaaagcagtggtaagaggaaagtttatagttctaaatgcctgcttcaaaaagtcagagagatctcaaattaatgattcagcatcayatctggaagaaccagaaaaacaagacaaaaccaactccaaactagaagaatgaaagaaataactaaaattgagctaaactgaataaaattgagaccaaaaatccataaaaagaatcaatgaaaccaaaaattggttctttaaaaggataaacaggatcaataggctactaactagattaacaatgacaaaaagagaagatctaaataagcacaatcagaaacaacaacagtgacattacaactgatcccacagaaatagacaatatcctcagaaactattatgaacaactctatggacatgaagtagaaaatagggaggaaatttataaattcctggaaacacacaatctcccaagattgaattaggaagaatttgaaacactgaacagaccaacatcaagttccaaaattgaatcagcaaaaaaaaaaaaaaaaaaaaaaaaacacagccctgaactagatagattcacagccaaattccaccagatgtacaaagaagagctagtaccaattctactgaaactattccaaaaattgaaatcaaggaggagggactcctctatgactcattctatgaagccagcatcaccctgatatgaaaacctggcaaagaaacaacaaaaaagaaaactacaggccaacatccctgataaacatagacacaaaaatcctcaacaaaatacaagcaaaccaaactcaacagcacatcaaaaagttaatttaggctgggtgcaatggctcatgcctgtaatcctagcactttggaagaccgaggcaggaggactccttgaacccaggaatttgagaccagcttgggcaacataggaagaccccatctctacaaaataattagccaagtatagtgatgtgtgcctgtagcccagctactcagaaggctgaggtgggaggatgacttgagcccaggaggctgaggctgcagcaagccatgttggcaccactgaacttcagactgggcaacagtgcaagaccatgtctcaaaaaaaaaaagttaattgtgatcatgtaggctttatttctgggatgcaagattgttcaacatattcaaatcaataaatgtgattcaccacataaacagaattaaaaaacaaaaaccatatggtcatctcaatagacatggaaaaagtttttgatagaatccaacatccctacatgttttgtttatgtttttttctgtgaaatataacacatacaaaatgcataaaacatgtataaatgtaattccatgagtaactctatgtgaacacccgtattaccacccagttgaaaattaaaccttgctataataatacctaaaatcctcccatgtattacttcctgattccaaaccactaatgtcctctgaaaagtaactatatcctagcttttctgataatcatttccttgcttctctttactttcatcaagtattcccaaattacaagtctcagttttccttttttatactgtaaatgaatggaatcatattttatgcatttcctatgtctagcttctatctttcaacattatgacagtaaggctaccatgtaaatgttgttatagtttattcattttcattgatgtctggtattccattgtatattttatacattttactcttggtggacatttattgtttctagctcaaggctattacaaacagtgctgctgggaaatcttttgtgtatatcctgatgtgcatgcccatcagttcctaagagccacattgccggttaaaggagtattcatatcacctcagtgttatcagatgattccatactgttttcaagaaatgcctgtaatagtttttcaaagctttacctttggtagcttgagtcctaaaacgtaatacatgtagattaaccagtttcttttcttcatcctaaccaaattccccataaaagagatgaattttctcttcagccctccttgactcagctaatttgttattttagaatatggtaattttagtaccccacattcagatatcaaagaaacaaatttgtaattaagtgataaatcaattttttacatggacacccttgatacaaagcttaaatgatgtcctaagagtgctctcgctctctctctctctctctttctctcttcttccttttctccttttttattccctcccccatgtcttatctttagtcatttggtagggaagatgactgccaaaatcacatccaaagtaccatcttcccaccttccaatccatgtgaaaagagacaatctgtcctgcatgttttcataggaaagtcccaaggtggcacatattagcctctctgaatcatgtgctttctctgtcagggttgttcagagggcagagcacctagactgaccacctcatcaaaaccacacacagtggctctgcaaaggaaatgatgcctgcgtgtgtatatgacttgttctcaccaagtaattattttttcacttacgtcttaccttccttgaaggagtctcatatctttgttcccattgtccaacaggatggttagcacataacaagagctaaataaaagtttgttaaatgcattagaaagaagaaatggctctttttacatgctccaatgtaaaagatactttatgagaacccatgttgacataaaggggagatgatttaaaaatacatgaaatgacatcgcattgactggatttttccacatacagtaaatttcatatatattcctatataattattgctgcagaatacatactttttcttattttgctttgtttggaagtggggttttcatgctgtcatggtgagtgaatgttttctaaactgtcacatggggtacttagagaaatggaaactgcagtcctggattctgtgtttcaaacagtgccagatgctgtgaagtcatatgcagatgtctttacatcgacaaaattatagtaacagttgggcttctttgtctgaatatttctgcttagaagggttaagtagcctagcaggcagtggaaactaaaaccttctgttcagctatggggcacaaatgatgaaatcagccacagtggttgctcagttaatgtcctcaaccttgatgcagaagaactgccttgatgaatgtaaaacatgtgcctggtggaagtcagagcacagggcatgctcactgttgactactagagacagtgatatttgcgggtgcaaggctaactctgacctagtggaaagaagtgcagaaccaggccaaatgggaggagtattccaggatcaaggtcagtcatttcccaacatgttctgcaactgaaatgaccatgatgacacggggaaagaatgtaagacctcaagtggcctttggcttgatttacttgcaacttttgtttctaattcaatccacaaagataccattgtgttttatgtacatctgccctttgtccctggaacatcctttcttttccttgtccacctggaaagctcgcagtcataaatcaaatataagcttgcaatgtagctcctctctgaagtcttcccctgtccccctaggcaacttaggtgttccttccactttggattttactgaaccttatgcatgtctttgtggcagctggtatttcattatattataaactacttattatatattaattgtaattgattgttgatatttgactccctagtagacaatgagtgccttaaagcaatagaatttttcttttcatctttgtattgcaatcccaggaacaagataaaacttcataaatattaatgaatagatttattaatgatttcatatagtaccttggaattttctaagtgctttcttatccattacctcatttaataacccaacaatgctgtgtggtacacaaaccacttataattatcaccattttactgattaggaaactgaatcatcaaaatgacacataatttgccagcttcaatagtttatgaatgtcaggattaagctagaaagtaggtctctggcttcagccagagtctatgttgagcctttatttctcccacagactgaagagtcactgcctcaggactaacagatctttaaaatggagctagggcagctagaatgctttcttcaatacttcaatatttgatcttcagctctgtttttaatgcacgacatcttcttctatcttccaactgcactttgaaccttggatgtcagatttctgggtacccatgtcagaatttggcctggatttcttttactgatcttgctgcctacgcaaagcacaatgtcctagtayacgtccctgttactgggaccacttctctctctgaatataccagaggttcctaagtatggcagcccagttattctaccattacactgcagctccacacatttctaactgtattatgaattagcaatcatgataactaatgataataactaatatttctcagtgtttgccttgttccacacatagtattcaataagtactaccttatctgttcctgacgacaaaactcatgacctagaactaatactatcaccattgtacaaagaaggaaattgaggcttagagaagttatgtgacatgtcccaggtgacacagctagtaaatttccaagggaatatgaactaaaaggcatctaatttctgaaagcatgcctttaaccctacaatattggtaaatttctgtaaaatcaacygttatacttggtaaatgaatgaacatgtgcacagtgtgactggggaaagaaagatgatgttgtacacttgtcacatgataggtgaggtactcgatgaatactgttggaataacattttcatgcccaagctctaatttaactaattttataaaactgagaatgttttagcaactccgtctacatgccctggagaaaaatayttgtttttaaatattctaaagcactcaaaagttttcaagatcatgaaactttatccatctggcttagtggaggatttgataagaaatatagctgctttccaaaggatatactcaatgattctttcattaaaattaattcccaacttactgcatctaaatatagactttattttaaacaactactaaatgcaaatggttaaaatcatgttaatcttctgatatatcatctgatacttgcacttgtgatgtttcaagactttggatgaagcccaaaatgcctaccatgatgattctcaaggcttttgatttctgatcgctgctctcctcctctcactctctctccacttgagctcttcaaattctccaaaatattacactccattttttgtccaggacttacatgtattatttcttctttccccactattttcctggctctcctcaactcatatatcaaatcttgaagtaaaagtcagtttctcagagatcccctctcctgagccctcactgtaagttgtttccccattatgtttccatagcatcctgctgtccttccaaacactcatagcactcataaaaacttttccagggttcatcttctgccatctttcactgtgtcttacacatgatgggtgctcaatgaatatttgataaatgaatgaatgaaggcattcctgtgttaaagccagtgttgtgtcaatagccattgtcacaataagataatatgaaagcaagtatgtcttggcttagtgagtgtgtttggcatttggaatcagatacgtgcttcctcgaggacctgtctcagttgccatgatcatataaggtacattgggctgaatgtgataagaaaatcaactcaaactaacttaaaacaaaattcattggctcacatagtaggaagactagaaggaggtgtggactttcagggaatttgatccaatggctgttctctattatcttacctctcagacaatatctccagtccttttccattgtggttatgggatgatgtcagtagcaattaagactacatgcttcttcaggcatgtccagtgagaaatgctgagagactctttctcttctgaaattcttataaaagtttggaaaaargaaaaacacttgttttagaaataactaggctcaattccttctgtaccttattggctcaaatccaactatgtgtccgtttctcaaatatttactgtcatttcggaagctttattggcttagtccttggtttctgagtcaatcattgatgtagataatgggtttatcatgactggtttcctgggtcttcttctgggccatcacattgctgaattctaaatggccagagattagggcaaaaggtccaccactatcatcttctcaaaactgcaccaatattatgctcatgccctttgatttttttgaaaaggctaaacatcaaaattcaatcagatgctgtatcaaaatctaaattcattctaggaggaaagtagaaattttccttattagggagaagaagtatatggaacatttgtgtccccacatcttccttgttcagacagagagagaagtggcaagcaggacacaaagaagcaaatgaggcatcatgagtctccagatacataacttcttccattttgagagcaaattctggcacccgtctcatatttaaaagcacacatttagcacctgcaggatggagggatcttgactggtctctcagggtgctggaattaaaataaagattattgaagtttcatttacagaacaaatgattagcattacgttttaaggagcatrtaactaatggttcttcccctgctaaggtattacttttcatcacttctttttgtgatcttctgaagatctaaatgcactctaaggtaaagaatggtcttctttttctgagaatgatattttttttttcatttgggactatagcattcttttctgttttgtcctccatatgtcctcataaatataattctggcactggaattcagacagcacttcccagcacttgcatactcagcattaggccactaagatatgagatcatgtaagctctgtgccatttaatcactttatattcctttaacaaatgagtattgagtgcctactatgtgtgagacactgtgccaggtgctttcagctgcagatgagatgtacatcttgtctttgaagagcttacaatagcatgaggagcaaaactgattaaagatacaaggaatcgtgcaataaatgcaaattgtatggtgccgcaaaataaatactaaagacagtgatttgatgagagggtgcttgcatggttgacttatagtggacagggtttgattttggctgagcagagtcagcatttcaaaaacagaacagaaggaaaaattaaagaaagtaggcttcagtaaggcgttcagtaaggaaatactgaatgtagacaaggctataaaaaaaaatgaagatccatgctgtggaataaagcattctcaacttggaaagaaactctaagccagattacagagggcctagaatgctctattttaaaaatctgagtgtttttctggaggagtaggtagccccagaaaatttggggactatatttagataataaaaggatgaaagttacgtgaaagttatatgaaaggaaaatccctgtgtgtgatgaaacctagccaggagagagtcaagattcatctattgtcatagtgcagctttgtcaaggaaaggatttgactactgatgtagtaaagggactattcagtggtaaaggaagagaagaatctcacaacaggatttaaatagttagcttacatcactgagttatccttactgccattaacgcagggacatgaaagtgggtgtcaaaagagttcccaagcctggcttcacattagaatcatctgcagagtttcaaaaaatagcaatgtttaggcctcccaaataattagtcttgagtggggcctgggtgattggtagtttataaaagcaaactgcatcaagggttaagattcactgagatagatgatggtgggttcagtttctgtgaaaatcctctcctattgcaggtatattttattgggattttttagagggagggaggcaggaacagaatgaaataaatgttctgcttctgtcgtggttggtggagttcaggagcttgataactgctcccctgttgtgaagcatgttacatagctccaatccttgatcctgacttttaaaaatacaatccagcacaagcagtgtgctgttgtttttcaaagaaatttacacatagcccactagtcacgtctatattctaaacttacagaacattttctcactcaaaggattgttcatttgcttcttctttgttaaaacaaaaaaaagaaagaaagaaagaaaaagaaaaatagattatgtcttcatttgtttacaggaaaaaagacaatgtaaaattatagtcatcaggtgtattaaacatgaataatgttaagtattagtccaaagtggatggtttttatttttcttttttctttccttgaagaaaaatcactttgtgctttatatggataaacatcaggaggtgatagactttattcatggctgtttctctgcataaatgctgtattcttcaagaaaaatatttctaatcaagagttttatccctttcactcaccccacactctttgttcacactgggaggtcagcaccttatgtttctgacattgtaatttattgctgctggaaagattgagcatttgtataggatttccaccataattcagctttgttgcaaagtcttaccaagtataacttcttaagaatactttctaaaggatacttgatggaattcaaaaatggccagatatatttggactcagcaaatgggtataaatataaatagtatggagacagatttaatgtaaaataaggtgtgtgtgtatatgcatggatatgcaaatgaatgctatatgtaggtcgaacgcatgagtttcttttcttctttagcaaaggacagttacatttaagatgatttaatgagttagcactatatatgttacaggagttagatgtgtgtgaaagactttttttaattaaaaggcatacattttagatttcaaattccgatgtttcaaaatgtgacaaagaattttaaagacttctttttgccttgtgttttgaaaataagcttctatggaagataataataaaaaaataaaaaataaaaaataaaaaacagaaatagcctctcagaggaagcctcattctgtgaaaggctcaagggaagcttataacgaagagcacaccatagagggaactcaggaaagggcacttccatttccctgagagcagagcatttatgctggtgattgtcttccaaatgagctctccccctgtcctttaccaattattgatagctgtgataccagaataattgagtctacgagcttatagtctgagcacaaagggacacctctgagtaggactatctctatctatccaagcagatggtatctgaagatctcctgttaagaagacagcctatctcctgtctccaggaatccataagtaacctttactttcaaggctttctctcaaatgtttcaacaaacccagccaactttttcatattctgacctcactggagctaaagaacagctggcctacattttcctaatattagctcttcatattttttaagagtattattatatcccacttcagctctctctcttccagaccaaataatgtaaactctttaatcttatgtcaagtttcctctccatcaatttattgcttttttcttagatgctgcctaatttttcaatatcattktaaaagtacaacagcctggagtggacagacatttcacaagactacagaagatgaatctgagaaagaacatggttgtctatattttgcatctgtagtgataaccaactttggtagatttctttaagataagctatagtttttgcacagattattttcawtatttactcaaattgtttatttttcttcaatgcaatctttacattgagaccttgagtccattgtttttatctacattgtatacctaaagagaaaaccatgatcatgtatctaaatgcccaagaaaacagaaagcaatgaaatcaaaactggacccagggacttctttgcatacaaactaatatgttggttttgaaagtcatcctgttacttctcattggaacagctctccacagcccaagcccactactcaggctctttagctgagtggttttttgtttttgctgttttgcattattgtactatgcctttttttttccatgtttaccactttcttctttctctcttttttgacttttaccttagaattgtggagaatatgcacaggtttgttacaaaggtatattttgtgatgctgaagtttgggatgtgattgaaattgtaacccaggtagtaagcataatacccaataggtaggttttcagcccttgcctcctgcctttctcccatgtagtagtccccagcgtcttttgctcctttttttatgttcatgtgtacttagtgattaactcccacctataagtgagaacatgtagtatttggttttctgtttctgctttagttcacttaggataatggccttaagctgcatgcatgttgctgcaaagaatatgattttgttctttttaatgtctgcattgtattccatgatatatatgtactgcattttctttagccagtccattgtgaatgggtgcctggattgattccaagtttttcctattgtgaatagcactgcaatgaacatatgagtgcatgtgtccttttggtagaatgatttcttttactttgggtatataactagtaacgggattsctgggttgaattatagcactgttttaagttctctaagaaatccccaaactgctttccgcagtggcaggactaattacattcccaccagtgtataagtgtccccttttctttgcagccttgccaatatctgttatttttcactttttaataaaagccattctgactggtgtgagatggcatatcattgtggttttgatttgcatttctctgatgattagtgatgtggaacattttttcatatgtttgtgggttgcttgtatgtcttctgttaagaagtgtctgttcatatcttttgcctatattttcactgggttatttgtttttgactttttgatttatttaagttccttatacattctggatattagacctttgaagagatgcatagtttgtgaacatcttctcccactctgtaggttgtctgtttactcccttgataatttctcttgctgtgcagaagctctttaattaggtccccacttatcaatttttgtttttgttgccattgcttttgagggcttagctacaaattctttgccaaggctgatatcacgaagggtatttatttcctaggttctgtgtgaagatgtttatagtttgaggtctttaatccatccttagttaatttttgctcatagtgataggtagagatccagtttcattcttctgcatatggatagccattcttctgcatatggacagccagttatctatctgggcatttctcatttctcagctgtagcgacccttctcctgggatatacctttctgaaactccacatttcactcacacttttgcacaaatgtgccacaggaaactgcttagtcacccttgttatgagttcccatagcatcctgcacatctcctacagtaaccaaaagcatatattttatctaaaaaaaaaaactattctaaaatataattcgttgctttatattataaaattgttggaatggaggaacaagataaacagccacagatttctgggcctgcaaacattttattgcagtaggtatmacctaacatatactgaaagttgcttggacagaagccagtgaaagatcaattgattcttctttgttatgctttcattgcttatatgaatcttgggacttcaggttatatcatattgagagtgagcaaaaaaaattcttcaactgtttaaattccttttctttctttcacctttttattattttttaccacatgatcacttctacctagaattcaatctttcatgaaaatcttaatttttcaatacctttaagagccaaataaataatattttttcttcctgtaaagatacctctgccccctgcttgattggttacctacaacctgttgaattagttttcttgaagctcctggattatagaatctccatctttaccatttaaagttattcggaagccactgggatcaaagaaatcttcatttccccatgctccttaatttgggataatgtgtgactatgtgtatctacgcacatgttaaaatcagcccaacatttatagttatgtttagttgatatggtttaagggtaaaggtaaaacatacagattgtgttgctaattcaagaaaaattgccctgtgcattcctttatagaatagtgcaaataaaatgcagtacsttgatgacaattacttatattaatatgctgaatttttatctgtgtgttccaaggtccatgagatttgacatgtaagaacatacattaattatcagtttgtttcttcaacaaatatctattagaggttggtaattaatgtgtagaagtgaacaaaacaaagcaaaaaagtaagcaaaacaaagtccctgccctcatgaaactcacattattttagtgggggaggcaattcggaattatatacagagaacattaatcagagagaaataaggtaaatagttatagtcaagtaagggaagactactctatcatatatatttttatatatgtgtatatatattatgtatattcatgaatggcctttcagaaatcaattgagcagagaccgaagaatgaattagggaagcagcattgtacaccatagtaagttctttggaattcatttcaagtgtggtttagaaacgcactggagaattttgagcaggagaaaattttcactgctgtgtgaatggagagtgcaggacaaatgtggaattagagaaacaaaatgattcttgtcattttccacacaagaacttggggtgaacttgggtgctgtgrtgatagtgttgggaagttagaccctggatgtactgtatctgaaagtaaatcagacaagattccctaactgcctgaatgaaagaatggagtccagaataatttaaaggtttctggcctgagtaactgggtgactagcagtgcaataaagaacattagacataggagatgggagatggaagatcaagaatttggttgtgatatgctgaacgtaaaacagctactaggtaacaaagtagaaaaatcaagtatattgtcagctacatgaatctagatttcagtagaaagttcagtgcttgaagttaacagcctacagattatattggcttcaattagataacctacatgttaaggaggaaagagaagaaagactgaagcctgagccctggcacatttctatgtttacgggactgaaaaaaaaaaaaaaaaaaggaggatccagcagagaaataattaagaaggagtggtccatgtggtaagaaaaaaaatagagaagtgtagtataccagaaagacagtggaaaactgcttcaagtagttgatgtctaccattaattgctttctgtttctcctcttcctctctctctctctcttaacacacacacacacacacactctttttcctaaacaaatgccttaacacaaccacataaacttttagccttaaaataagaaagataatattcacattatgtaaaactctttacttactaaaaggattccaaaaacatatctttaaataatgaactcttccagcttatcccaaataggattcaactatcaaaacgtttctgaaatatttttctattgtaaagcatgctggaactctgaaatagccttgcacagtatatttgccgtggtcagaaactggcaataaaatctgaacaagtagagtaggtagacccaggttctagtcttggctctgacatgtagtagcttaaccattcaactaacctctctggccttagtgttcacatttctggaaggttcagagtgggtcaggaatcgctcttagattctttcaagctctatttaaaaaaaaaaaaagaaaaacataattctaagtgttaatagtgtataggattctgggaagttctatctattggaaaaaatggatacttgctccattatatacagagtcctatatattattgtatacaatgttatgacatctgaaaatatgttttcattacagagagctctgttatttgagaaaccttcttaacccagtgctatgtgaacttgttggataaactgcatcatgcttttttttttttttcagaaggtgactgaattggtgcatataagcagatggttttgccccacagctttcttctcaactggactcacatacccttctccatatgttcctaaattaaaatgttggatgtcaattgtgaggaatatgttggaaaattttaactttgcacttaaaattttgcccttgcattttctctatgacctatctcacaaccatgcataatttctaaattacaaccctgattccagaaattggcaggcagtaggtagagatacttagtaggttgttccccctaccccatctagtgagaggartggcagacaacattagaaactaacaaatttagatttgcattcccttagtattttcatgttggccaagtcacttgtaaatagacattttctcacttgtaaaatagacattccaatacctattttgtagaattgcaacacgattgatgaattaacatgggcaaagcacctaacacaatatttcaaacatgatagacaatctccctgtactactctcccttctgtgccttcttcattcttgaatgcagggaataggcaaataaaagtaactgaagtgagcagataaaatttctatttgtcttctggatcagcattttcatttcattcataactgtaggcaacaatcaaaattcaaattggaccgagtttatgctataattttaaaaagcaacacgtagaagacaacaatcccacaatgtttcaattttgttgtgctaaatacttagatagacaaaatattttcagtagcagttgaattattaaataaagaatattaagaacaatagcatgtttatgtggaygagatgtcataatgagaaccaaacctcttgcatttggtgacctcaatgtatttaaatttgtaacctcaacatcacattagcaaaacgttttgcttttgtaatctgatgcatgacttcaaaagttagcgagtttctagggaccttttcaaaggcgttatgtaaatggaagtgattattatttatgactaatccagctgcatttttactgtttttcctactaagggttttcatgcagattaagctatgaaccaagcagtaaagatgacactgtgttcatgtaagtgaaaggaagttatttttaggtaaaatgttgtctttaaaaataataagacaatatttcatatcataaattatttctaccamtcttcacatgttttatctaccaattagttttatttcatgatagaaacaatacttttttcttttttttttttttttgagatggagtctcgctctgttgcccaggctggagtgcaatggcatgatcttggctcactgcaccctccacctcccgggttcaagcgattctcctgcctcagcctcctgagtagctgggattacaggtgcccgccactacacccagctaatttttgtatttttagaagagacggggtttcaccatgttagtcaggctggtctcaaactcctaaactcaggtgatctgcctgccaaagtgctgggactacaggcgtgagccaccacacctggccaatagaaacaaatcttactatactattcttacaaccgtgttcagactgagaaaaaaataactgggaacacttgtctagtcaatcttctgtggcctaaattacttctatcacatcatctgttaccttccaaatattccagaattatggcttcatccatccttttgtgtttcttgagtcactcactccataagtaggaagcatctaatctagcaggaattgtgacggataaaaaaattacgtgtcctattattaaaagatatcatattttataacttaatttgtatcactacggaggtattctataaagtaaatctgaaaatgtcccactcttaaaattaaataacagctatgtcgtttcattgtgtgtgtgtgtgtatatatatatataaatatatataaatatatataaatatatatataaatatatatataaatatatatatataaatatatatataaatatatatataaatatatatatatgtaaatatatatataaatatatatatatgtaaatatatatataaatatatatatatatatattttaaacccaatggacataccaataacaacctaacaaccaataaatactattgaagatgcatgggcatagtggttaagagcccaaactcagctgggagcggtggctcacgccggtaatcccagcactttgggaggctgaggcaggcagatcacaaggtcaagagatggagactatcctggccaacatggtgaaaccccatccttactaaaaatacaaacattagctgggtgtggtggcatgcacctgtagtcccagctactcgggaaactgaggcaggagaatcgctcgaacccaggaggcagaggttgcagtgagcagagatcacaccactgcactccagcctggcgacagagtgagactccgtctcaaaaaaaaaaaaaaaagagagagagagcccagactctgggtataaggtctggacataacttactagtgtatgatgttaggcaacacactgaacctcgatgcaatgatactagtaataccaattcgtgatgtatttgtgaggattagatgagccaataaaaggagaatacttaaaatagtgtctggcacattttgtttcataaatataagctatcaccattattttgccaaaaatacgtctgttgtatcctgtcacagtagtaatcttttcttgagatccatggaaggaatacagaacatgtacataaagcaaaccaaaaatgaattatttgctgagatattgtaccacctacccatcaacagaaacaaaacaaaacaaaacaaaagcacagaactctaggagttcatctggaccctaagaagaatttatttcctatccaagggcagagtgaatgtccttgaaacataggaggatgaacatcactactactggttactttttctaaggctaaacctaacactcagaccttaccatagtaacttttttttttcttttttctttttttttttttttttgagacagagtctcgctctgtcatccaggctggaattcagtggcatgatctcagctcacagcaagctctgcctcccgggttcagaagattctcctgcctcagtctcccgaatagctgggactacaggtgcacaccactatgcccagctaactttttgtatttttagtagagacaggttttcmccatgttagccaggatggtcttgatctcctgacctcatgatccacccgccttggcctcccaaagtgctaggattacaggcgtgagccaccacgcccaacctaccatagtaatttttaaaaataaaataaagctgcattgaaattaggaaagagtagaagagaataacaaataatataataaagaacatttaaaggagtaagagataaataaaaccggaggaagatcgagacacacacacaaaaaaaaaaaagaaaagaaaaaaaaatacagagagacagagatagaaagcttgagaaagaaaaaaaaagataggcagaaataggaagagagatgcagaggcagacagacaataaagagacacagttagagacagaaagaaagagaccaatagaaaaagagagagacttaagaaataggatagagacaaagagaaaattatgaaaatagaaattatggggggaaaaaaagggamaaagggtcacagtaattgagcaagagacagggatgagaagaccctgcatgatactttccttctccaggctcctgaaagagagcaacctggggatctgttaacatttgactctaaaggaagataaaagaaaacaaagagactgcactccctggtccttggcccttacatcagacaaagaagaatcccccattagcagtactccacttccttggggatagaagaatgcaagagtgttgaacagagacctgtgcgcttctgctaaagcccatcagctacagctaccaagagtatgctaactaataagggattttcatatatcacttaatcctttcccaggtccagtattattaacctcgtattactcccataaataaaatgaggctggtagaggtaaagtaactttccaagcacacaaagaagagccagtactccaacaaaaccctcgaaacctatatactgctgcctccttggggtggtgggggggtggtctccgttttaagacttttgattaattttatctcaagccatgatgactactatcagttttctcatagaatacaaactgacactaaaatgaaggaacaaaaaaacaagtaattgtcaatgtaaaaatttaggaatggctatcaagtgatgttaataacwggttatctttttcttgaacacaaatgctcttggttaccattttatattgtgtaatagacakgtatrtatttacattttgctagcaaggatgttcctagttttgtatgagtgaattaaatcaatatctcatgctctttctacaagagtaacatggcttaggaggactttcctaggggaacaagtttgagaaaccctgaagtgtttctaggtgaggagaatatattacaggaattaagaacttgaatatgactttaatgtaaacctgtaattgttgactggcttatttaaggaaggtttcctgaaggaattgggttttaaactgagacttgaaggaagtatagaatttggtttagctgatggaaaggaggatgcatcttagctagatgggactgtatatccaaaggtacacaggcaaagatgagtgtggtatgtatagatgctagtgtagatggaattgtggaatccattaccaaataatcaatgataaaacaggaaaaagacagtgaggtaaactgagagaggccttgaataccagggtgtagagcatgaatctgaatcaattgccagtgaagggtttattgtgtcttttttcaagagagtatcataaagatactctgtaggagtatctttatggaatgctttaggaggattctagcgagcaagatgaattgcagtagatagccaggtgcaaagtaataaagtgaggacagcagtagaaatgaagaggaagaaaagaatttgaaatagagtaaaaacggaaaagtgaaaagatgaacaagtcttggtgactgctctgttacaggcgggaggtgagagtcaatgaaggaaagagatttttttccaaatatatattttattctaaataaagaaacctattaataattcaggccttaagtgggagattcacaagtatctatgccttccagttccatcataattaagttaccatgaatgattttctgtttgataaattcaagagagattacagtaacacaaaccgatccagagttcaaccttaaaatttgatttagcaaagtaaattgtttccctgattttagattgctgtggttttctttccctttttgtaattttctttttaaaaaatttttaaattttcatgagtacatagtaagtacatatgtttatgggggacataagatattttgagaggtatacaatgtgtcataatcacatcagggtaaagggggtatctaccacctgaagcatttatcatttctttgtgttacgaacattccaattgtattatactccctcaattatttgaaaatgtacaacaaattatcgctgactgtagtcattctggtgtgctatcaaatactagatcttattaattctatctaagtatatttttgtacccattaatcatccttatttcaccccaaccccactattcttcccagcctctggtaaccgtcatcctatctccatgaatttaattgttttaacttttacctctcacaaatgagtgtgaacatgcaaaatgtatctttctgtggcaggcttatttcacataatataatgttgtttagttccatccttgttgcaaatgacaggatctcattctcatttatggctgaatagtacttcatggcgtatatgtacgacattttctttatccattcatctgtcgatggacacgtaggttgcttccaaatcttggatattttgtgtagtgctgcagtaaacatgggagtgcagatatttctttgatatactgatttcctttctttggagtatatacttagcactggaattgctggatcatatgatagttctatgtttaattttttcaggaatctccatactgttgtccctagtgagtatactaatttacaatcataccagcagtgtatgagcattcccctttctccacatcctcgccagcattcactattgcctgtattttggataaaagccattttaactggagtgagatgatatctcattgtagtgttgatttacatttctctgatgatcagtgatgttgagcatctttccatattcctttttgccatttgtgtctttttttgagaaccacctattcagatcttttgcccatttttgaatcagattactagatttttttttcctacttagttgtttgagctccttacatattctggttattaatccttttcagatgaatagtttgcaaatgttttctcccattccatgtgttgtctcttcattttgttgattgttccctttgctgtgcagaagctttttaatgtgatgtgatcctagttgcccttttttgttttggttgcttgtgcttttggagtattaatcaagaaatctttactcagtccaatgtctttgagtttcttccattttttttagtggtttcatagtttgaagtcttagatttaagtttttaaccaatttagatttgatttttttaatggcaagagatagggttctagtttcattcttctgcatgtggatatctagttttcccagaaccatttattctgggaaataatctggaaaataatttattatttcccagaataaatggttaaaaataaattattaaatataattggttaaaaaatcaataaataaaataaataaaattattaaaaataatttattatttattgaagaaactgtcctttccacagtgtatgttcttggcaccgttgtcaaaaataagttcactgtagatgtatggatttatttctgggttctctgttctgttccattgacctatttgtctctttttatctcagaaccatgctgttttggctagtatagctctgtagtataatttgaagtcaggttatttgattcttctaattttcttctttttgctcagggtaggtttggctactctgagtcttttgtgttccataaaaattttaggattatttttctatttctatgaagaatataattggtattttgrtagagattgaatctttagattgttttgggtagtatggacattttaacaacattgatactttcaatccatgaacatagaatatctttccattttttgtgtcytcttcagtttcttgcatcagcattttatagttttcattgtagagatttttcatttctttsgttaattcctacatattttatttgtaactgttgtaaataaggttactttcttgatttctttttcagattatttgctattggcatatagaagtgctactaatttttgcatgttgattttctatcctgcaactttactgaatttgtttatcaatctaaacttatttaataattttttggtggagtctttaggtttctccaagtgtaagataataccatctgcaaacaaggataatttggcttcttctgcaaagaaattttttttaaaaaattgtgactgaggaattatttataataaagctgaagcccagaattcaaataaacaagctgatcaagaacaagcatagaaaggaaatcagagtcatccaagcccattgcattctgatgtttttttcttccctttcaaaaaaaaaattagctttgacccctgtatgttgttgtcatgtttaatcaaattggaagtcttttaataactgcaatggaatttcttaccttgccttcctccagcgttaacccttaactgctgttattttaatttctctttgagtaggattttttccctggccacactcagtgaagtgtttgatctcatcactaactgcaagtccagttgctgatgaagttcattttgttttcctctctcctgtgcaccagatctaattgtaatggccatgtcaactacgaggtgaaacagtacacctcatcacgtaaaacgggaagcagtggaactggccaaaagtgataacttgcatgttttttattttagaacagcttaataaaagaatttaaacctaacaattgcaccagaaaaaagtatattgttaaagtgcttgctagttacaagatgatagacaggggggcaaaaaaaagaaaaaaatagttgctggcaatgggtaaagtatcgaccagactctaatttcagcaaatgatcaaaatcatgctagcaggttgcattaagacctttattataggccaggcgcagtggctcacgcctgtaattccagcactttggaaggctgaggcagatggatcacctgaggtcatgaattggagaccagcctagccaacatggtgaaaccccatctctagtaaaaatrcaaaaattagctgggcatggtagtgggcgcctgtaatcccagctacttgggaggctgaggcaagagaatcgcttgaacccgggaggcggaggttgcagtgagccaagacggtgccattgcactccagcctaggcaaaaagagtgtaactccatctcaaaacaaacaaacaaacaaacaaacaaacaagacctttattatctgttttacgttaaccaactacttaaaagcccttgatgaaagtcgtatttttgctggatttttgtgagatctgtttcagccacyttaactcactgacagctttctctcaaarttgttttaactktgtgaaatataatatttttatttttcatggatgtagtactttaaatttacatgtgcatatttaaactccacccaacaatactccaaggaactatttcctygtcttataaaaaaggaaagtaggctattaagtgaggttaagttacttacccaaggtctcacagctaggattagtggagccaggacccatatactgctctttttctgagaaatatttttaaaatcactatatatatacacacacacatatgttataaaattatatacatacaattcaaaattatatatagtgtatatgtgtatttcacatacgtgtgtaattttgttgataaactgcctgaaactagttgcaaatacactcctcttgtttagtaaagcttttactttagtgttttagtaagcattttagtaaatgcttccttattgatttcacaaggttgaggagatacatttacccatttttaaattttattttactttttaaacttgattttagaataatagatgtgtttatgagcaaagagagcataaagttcatttacctgacttggtgggagggtcaggaaaaatatcacaaatgatttcttgagatgggtttatcaggagttcctgatgggttattactgctgtgccatgataatgtctaaatcttcaagatggaagccatgcctttagtctataagcattcatttcaatttcttgctttgaactaagtcttttaagtggtgcaacttgggctcaaggcatgaaaaatctaggcataaaatgagtctgaaaggtatggttggccttgtgaacathatcatcatcatcatcatcatcatcatcactaatgttttgcaatggtagttttgagaagagaataggatctacccaaggaacagtastgaaaggggtagtgaagtcaaatgtatttcagagaattattggcwtgggaaagatggagagtgtctccaaccagcaggtcaaccattacattagaaagttcccaggtgggaggtaaaattcctaatttagggtcagatattgatgtattaggtataacctttttaagagatgtgcaggctgggtgcggtggctcacacctgtaatcccagtactttgggaggccaagggcaggtggatcacctgaggtcaggagttcaaaaccagcctggccaacatggtgaaaccctgtctctaytaaaaatacaaamaaaaaaaaaaaaaaaaaaagctgggagtggtgataggagcctgtaatcccagcttctcgggaggctgaggcaggagaatcacttgaacccaggaggcagaggttgcagtgggccaagattgcgccactgcactccagcctgggtgacagaggaagactccatctcaaaaaaaaaaaaaaaaaaaaaaaggagagagagagagagagagatgtgtgaaatgccttagtcaatttagtcttctggggaaagaatttagcaggtgcaaacacggtatcaggggttgaaccatgtagcctgaagactgagttcagagcctctcaggtcttgacggactgaaatataggacattctacagtctgaaaacctttgccttcacaagcatgtaagtcttcttttttttttttccaaacttatttgtagttaaatacagaaataatctacaattaaaatgataatatttgaacctattctaattttattccttgctactctggttaaaaaaagattaactgagtttaaagagaccaaaaatatacatgttaatttatgtttttctaaagaaaactttagttttgaaaaataaataaataaaaaataaagaataaataaagagtttaagaaaactatcaccaagtacaacactaagtgaacatccatgtctgtattatcatcagtatttattacattgatttgctttagtttctatttaacctgttcaaatagtttaacactttagaaggaaagataaaaatatccttagctgtctcccaaaaccctttataaaaggaaagaaatagttaaagatattctttttcagattgccttttaagttagatttggaaagatttgcagtgcagagcacatttggaaataagctgatgtgtgtgtgtgtgtgttatgtatatatcaacatacacatagatgaaaagctaaaataaatattgtctgcagcaatgctatacattttatttacatagttctttggtggagaaaaaataatactttattctaataaattatagagtcacagtaaatgttacagaactttgtatctttcaaaatgaagttaagagtatgcatctgtctgtctgtatgttttatgtacttattccccatctcaatccaaaaagactttagagtgattccagagtctttaaaaatgttctaggtattttcttccttgcaagcaattcagaacataraatttaaatgagctgttcaaataaacatcagtggtagtaatggaaagtatctccattctaagggggtgagaaagagtttcagtggcaataaacaatagacttaaattatcagcatgaataatatgacattatcattctcattaagagattctgaaagaccttgcggtattctaaatccttaatcagataatgtacattcaaaattcaattacatagtataaaaaataaataaaacatccgatgtccaggaatccttaacattaacatacttcagtaattttagggcaggactatgagtgccagcaagctcagacagacagacagcttttacgtaatggaactgagctggacaaatgctgagcatataattattacatggcaatgaagggaagagggcatttgaacttgtcttaattaatatgctaactaagctaatgtctttactgaaagcttagggaagcttagctcaaatttgctttgtagaaaatgtgtccacaaagacagtgtcttggggaaaggttagaatcttcagagtaatggtactgactttttttttttcttggcctcttagtggaccctttgtactaaaagaatttgttccctaagaaaggtcaccaggagccttcatttgtgtccttctattaaatgctatcagattgaacagtggcattttaccgacctgcaattatgaggaggtgtgaacctaaatactctatgtgctatactaaatattatggtaaatgtattcccaaaccagaaatcaaggcacacaccctgacaagctcaaagatgctcaggagccagcaaggcggattaatggggtatattttggccgtatgattgctatatttattatgtgattatatgtcacatctcttacattaaatggcattttcactcagctcagaaaccgtagctgtgttttgaattcatttctgtcatcttgtgttctctcctcttctctcttctccctcctctcttctcatctcctctcttctcctcttctcccctctctgtttctctcccctaaaatccaatcaattgccaactcctatagataatgcacttttaatagctctaccatccacatacttcacagcatcttgccatcaacaaattggttaccctgtacttttgtaaattattacaaaacctccttgcctacagtagttccttttgcaatacttcatgttattaaaattgttcatttgtctgcctcccttttctaaactgtaaacttgttgagaaccatataaaactaggtctatttagtaagactaamttgtatttattttctagtgccatcacagaaattgacacatagtgggaactcaggaataaatgaataaaagcagattgcatattgacctaattttcagtgaaaatacatatttcagtttatactttgaatcagggaatcagttaacaaaatgtagccacaagattcttgaccctttaattctcctctctgagtgttctaaaataataatggatagaataaaatgccaaagattaaagaaaagcacacagttgtttaattgtaagcttttgtaagaaggaggaggaaggctccaaagttcaagcatttgtatattgcactttgaatcttgaatgatgagcaagggtgaaaaagtcaaggttagagaaaaacattccaagctgcaatgcaaagctgtagaggtgaaaaggaatagggcctctctgagggactaagattgctaaaatgctagactgcggggtgcacagaggagagaatggagaggcatgatgaacaacattggaactgatttatracagtcatccaagtgttttctttctgggtgaactagagcacttatgaatgcagattataggtaatttgaaaccctaatctctgcttattttcaccatactcaactgtgattctgaaaatgtggctttataagaaagggaatctgatgtgaactgatgtgaaattaaacatttctctgtatgtgactaactgtaaatcccatgcacgttctttgattcctgactgtcttatctatattttcatgcctcctgtgatgctcatcaggtgataatagtaatgtcaccgtgactgtctcaaattgtttggagactttttaagaaaacgttactcaacacaatatagctaatcaacatttttctcagrtagtcaatacattatgatgcggtaaaaaaaactaccatttctattctctaatattagaaggaacacacgccatcagaaagtggtaatgtctgtaacatctatccaaatactttatttcttacttgttacyaaaaacaaataaaccaraamagtgctcctcttactagaygagttgataagaatggattagtaagtaaaatccaaattactcagtaatattattatttttctattgcatttgattcatgtaaatctcaaagtgaattctgtataagaaaccattttgaattatcccatgttcaccatataaacctttatcctttcaatatctagcaatacatttatgatagccaaaatccagtaagaaaacagaatcactcagtggtagaacaggcttataaaattaagccaatgatatcaaatgattacgaatgttttaccacaggcaaactaagcttagcattttcattcctatgtagtgattgtttctattccctgtaaatagtcagttgaagtttccagttcctcaaagcaaggctgccttagagatgaactactgaaaactaaaccaattatagttgctgcatatagcaaacactaaatcgcttgtctttcacaataaggattgggtagctcaaaaattagatgaagttatttttcatcttcttttttttttttttttttttttttggaggcagggtcttgctctgttgcctaggctggagtgcagtggtgcaatctaggctcactgccgcaacctctgcctcccaggcycaagcaatcctcccacctcgcaccaccccctgccaacccccaggagctggaactacaggcatatgccaccacacctggctaatctttgtattttttgtagagatggggtgttcctacgttgcccaggctggtctcaaacccctgagctcaagcgatccacttacctcagtcacccaaagtgctgggattacaggcatgagccacagcacctggacctgaagttctctttctctcaatcttccatcaattgatttgaagatgtcttctgttatcygagataatgtgtcagagyagaggaaacaaacacgtctttggaggttgatggaaaaaatgtcaagccatgtagccaagagcaccctagcccccaccaaagctatattaaaactgaggaaaaaggttcaagattcacttcatgcatgggacttccagcaatatttggagacacaaggattgtgaatctttttcaaattggtgatgtaaccccaaaaggaaactgtatactcactcttggatggaaagggaaagggggattatgagaagagaatgaaattactcatagtaagaatcactatcctgttctttggaaggccttttgaaaaatatctttttctgctttctcatttcatactgcattaagcctcatgtaatttcccactgtggggggccttccccagtgaagcaaactgcacacgttcagatgccttctcctccagggcttctagtaaagataaaactagttatgtgaatgaagcattcattcgttaggcttcctcgggatctatttagtatgtttgtgaaggcatgaaaaaaggtagtaagtagactttctctttggatgatattttaagaatctcttgtttgctggtattttaaatccccaaagcacttactttaaaggtaggcaccacagtgttttctagttttcaatgtacagatctttcgattcactggttaaatttatccttaaggttgtattgtttgtttstttgttcttgagatgctattgtaaatagattgctttcttaatttcttttttaaataattgctagtatatagaaatgcaattgatttttaatactgattttgtattctgcaactttactgaatttttttattacttccaacagttttttggtgaagtctttagggtattctatatgtaagatkgtgtcatatgcaaacagaggcaattttacttcttccttttcaagatatctgtgtacctatgttcactgcagcattattcacaatagccaatatatgaaatcagtctgtgtttatcaacagataaatggataaagaaaatgtgatacatatatctctctgtgtgtgtatatataagtatatatacacagaaagacatatgtatacacacagtggaatattattcagctttaaaaaaggaagaaaatcctgtcatgtgtgactacatggatgaaactggaggacattatgctaagtgaaataagacaggcacagaaagacaaatactacttaatctcacttacgtatggaatccaaaaagttgaacatacagatgcagagagtacgatggtggttgccaggggctagagagtgggagaracagggagatgttagtagaaggataaaaagtttccgttatgcaggatgaatacattctgaaaatctcatgtatagcatggcgactatagttaataatactctagggtatactagaaataagagagtagatcttaaacattctcaccacaaactatgtgaggtaatggatatattaattagcttgatgctggtaatcatttcacaatgtatatcaagacatcttatggtttcccatatatatatatatttatatatatatatttatatatatatttatatatatatatatttatatatatatatttatatatatataaatttatatatatatttatatatatatatacacacacacacacacacacacacacacataattagtatttgtcaattacacctctataaagctgggaaggggaatgtaggtaccagctacacctggtgtctgcagggcttgatttcggtagttcaagttggaactgaatttaggaggatgggccttcacttaattttatgttattttcatgtaaattgtttaggtaccaaatcacttcctatctttccattctttttttccatattatctcatcttctcaatcaacaagtgtttatttgttaccaattctctctttctctcttatcagttcagcattagccatttgcacatctggaggtgagagaaggaagctagatggtgactgaggccaaaagagtcctgaggaatagaattagttaccttccttaagcatctgaasttttagagcccaatctttcatttcctttsccagccccraaaggaaatatattctggggytgggaaatatgttttggtactgggaaaggagttctatatggagaacttgccagaaggaatactagatttgtgatttattaaagtctgttaaacttttgaccattaatagtagaaaagattaagatataatcttgcatcatgatttttattattaaagatggtcaaaatgctaccaaacgtgtttttgtccctccatacccctctggaattttytgatgtcatttgaaccccaaaatagacttggctgaaagactaagaggtagtatatcaggtgatgacattgagtcaaatatttytatagttagaagcattaaaatactttataktcacttgaaaaactgtattaggttagaataaatatatcaagtatccattagctcactgaatgaaaatcagtcacatgcattagaaaactgattcaagtcattctttgtctgtggacttgagaagyatgttattggtatccaagataaaatgtactcatgtaagctacagccaatccctttaaaatcattcagaaaaaatgcttaaacttggtataagaaagggataaattattatctgtatgttatactagagtccttttatgtaaaaaaaaaaaaaaaaaaaaaaaacctcaaggttgtggctggcaagatggccaaataggaacagctctggtctgcaactcccagcgataccaatgaagaagacagatgattttttcatttccaactgatgtaccctgctcatctcattggaactggttagagagtgggtgcagcccatgaagggcgagcagaagcagggtggggcgtcacctcacccaggaagcacaaggggtcggggaactccctcccctagctaaggggagccatgaaggactgtgccatgaggaacggtgcactctggtccagatactatgcttttcccatggtcttcgcaacctgtagaccaggagattctctctggtgcctacaccaccagggccctgggtttcaagcacaaaactgggcagccatttaggcagacaccaagctagctgcaggagtttttcatacctcagtggtgcctggaacaccagcaagacagaacctttcattcccctggaaaggcgacggaagccagggagccaagtggtctagctcagcagattccacgcccacggagcccagcaagctaagatccactggcttgaaattctctctgccagcacagcagtctgaagtcaacctgggatgctcgagcttagtggggagggggggtccaccattactgaggtttgagtaggtggttttcccctcacagtgtaaacaaagccgctgggaagttcagactgggcagagcccaccacaacttggcaaagctgttgtagccagactgaatctccagattcctcctctctgggcaggccatctctgaaagaaaggcagcagccacagtcagggacttatggatcaaactcccatctccctgcgacagagcacctgggggaaagggtagctgtgggcgcacaactacatggaaactgaacaacctgctcctgaatgactactgggtaaataatgaaatgaaggcagaaacaaagatattgtttgaaaccaatgagaacaaagacacaacgtaccagaatctctgggacacagctaaagcagtgtttagaggaaaaattattgcgctaaatgcccacaggagaaaatgggaaagatctaaagtcgacaccctaacatcacaattaaaagaactagagaggcaagagcaaacaaattcaaaagctagcagaaggcaagaaacacttaagatcagagcagaactgaaggagatacagacacgaaaaacccttcaaaaaatcaacgaatccaggagcaggttttctgaaaagattaacaaaatagaccactagccagactactaaagaagaaaagagagaagaatcaaatggacacactaaaaaattataaaggagatatcaccactgatcccaaagaaatacaaactaccatcagagaatactataaatacctctatgcaaataaatgagaacatctagaagaaatggataaattgggacacatacaacctctcaaggctaaaccaagaagaagtcgaatccctgaataagccaataacaagttctgaaattgaggcagtagtcaatagcctaccaaccaaaaaaaaaccaggaccagacagattcatagccgaattttaccagaggtacaaagaggagctggtaacattccttctgaaactactccaaacaatagaaaaagagagactcctccctaactcatttcatgagacatgcatcatcgtgatacgtaaacctggctgctcaatgaaataaaagaggatacaaacaaatggaagaacattccatgctcatggataggaagaatcaatatcgtgaaaagggccatactgcccaaggtaatttatagattcaatgccatccccatcaagctactaatgactttcttcacagaattggaaaaaactactttaaagttcatacggaaccaaaaaagagcccgcattaccaagtcaatcctaagccaaaagaacaaagctggaggcatcccgctacctgacttcaaactatactacaaggctagagaaaccaaaacagcatggtactggtaccaaaacacagatatagaccaatggaacagaacagagccctcaaaaataataycacacatctacaactatctgatctttgacaaacctgacaaaaacaagaaatggggaaaggattccctatttaacaaatggtgctgggaaaactggctaggcatatgtagaaagctgaaactggatcccttccttacaccttatacaaaaattaattcaagatggattaaagacttaaatgtcagaccyaaacccataaaaaccgtagaagaaaacctaggcaataccattcaggacataggcatgggcaaggacttcatgtctaaaacacccaaagcaatggcaacaaaagccaaaattgacaaatgggatctcattaaactaaagagcttctgcacagcaaaagaaactaccatcagagtggacaggcgacctacagaatgggagaacatttttgcaatctactcatctgacaaagggctaatatccagaatctacaaagaactcaaacaaatttacaagaaaaaaacaaacaaccccatcaaaaagtgggcaaaggatatgaacagacacttctcaaaagaagacattaatgcagccaaaagacacatgaaaaaatgctcatcatcactggccatcagagaaatgcaaatcaagctgcartgagataccatctcacaccagttagaatggtgatcattaaaaagtcaggaaacaacaggtgctggagaggatgtgggaaaacaggaacacttttacactgttggtgggactgtaaactagttcaaccattgtggaagacagtgtggygattcctccgggatctagaactagaaataccatttgacccagccatcccattactgggtatatacccaaaggattataaataattctactataaagacacatgyacacatatgtttattgtggcactattcacaatagcaaagacttggaaccaacccagatgtccaacaatgatagactggattaagaaaatgtggcacatatacaccatggaatactatgcagccatwaaaaaggatgagttcatgtcctttgtagggacatggatgaagctggaaaccatcattctcagcaaactatcgcaaggacaaaaaaaccaaacaccacatgttctcactcataggtgggaattgaacaataagaacacttggacacaggaaggggaacatcacacactggggcctgttgtggtgtggggggaggtgggagggatagcattaggagatatacctaatgtaaatgacgagttaatgggtgcagcacaccaacatggtacatgtatacatatgtaacaaacctgcacgttgtgcacatgtatcctagaacttaaagtataataatagttatatatatatatacacacacacacatatatatatacacatatatatatacacacacayatatatacacatatatatacacayacatatatacacacacatgtatatacacatatatatacacacatatatatacacatatatatacacatatatatacacatatatacacacacatatatacacacccatatatatacacatatatatacacatatatatacacatatatatacacatatatatatacacatatatatatacacatatatatatacacatatataaaagaaaacctggcagagacacacaaaaaaagaaaatttcagcccaatagccctgatgaacatcgatgcaaaaatcctcaataaaatactggcaaaccgaatccagcagcacatcaaaaagcttatctaccacgatcaagtcggcttcatacttgggatgcaaggcaggttcaacatacgcaaatcaataaatgtaatccatcacataaacagagccaatgaccaaaaccacatgattatctccatagatgcagaaamggcctttgataaaattcaacacaacttcatgctaaaaactctcaataaactaggtattgatggaatgtacctcaaaataataagaggtattcatgacaaacccacagccaatatcatactgaatcrgcmaaagctgaaaggattccctttgaaaaccggcacaagacaaggatgccctccctcactacttctattaaacatagtgttggaagttctggccagggcaatcaggcaagggaaagaaatcaagtgtgttcagttaggaaaggaggaagtcaaattgtctctgttagcagatgacatgattgtatatttagaaaaccccatcrtctcagcccaaaatttcygcaagctgataagcaacttcagcaaagtctcaggatacaaaatcaacatgcaaaaaatcacaggcattcctatacaccaataatagacagagagtcaaatcatgagtgaactctcattcacaattgctacaaagagaataaaatrcctaggaatacaacttacgagggatgcgaaggacttcttcaggcagaactgcaaaccactgctcaaggaaataagagaggacacaaacaaatggaaaaacattccatcctcatggataggaagaatcaatatcatgaaaatggccatattacctcaagtaatttatagattcagtgctwtccccatgaaactaccattgaccttcttcacagaattagaaaaagctactttaaatttcatatggarcaaaaaaagagcccatatagccaagataatmctaagcaaaaagaacaaagccagaggcatcatgctacctgacttcaaactatactacaaggctagagtaaccaaaacagcatggtactggtaccaaaacagagatatagaccaacggaacagaacagaggcctcagaaataatgccacacatctacaaccatctgatctttgacaaacctgaccaaaaaaagcaatggggaaaggattccctgtttaataaatggtgttgggaaaactggctagccatatgcagaaaactgaaactggaccccttccttacaccttatacaaaaattaatgaaagatggattaaagacttaaatgttagacctaaaaccataaaaaccctagaagaaaacctaggcaatcctgttcaggacataggcatgggcaaagacttcatgactaaaatatcaaaagcaatggcaacaaaarccataattgacaaatgggatttatttaaactaaagagcttctgaacagcaaaagaaactatcgtcagagtaaacagtcaacctacagaatgggagaaaatttttgcaatctatccatctgacaaagggctaatatccagaatctacaaataattttaacaaatttacaaggaaaagacaacctcatcaaaaagtgggcgaaggatatgaacagacgctcctcaaaagaagacatttatgtggccaacaaatatgaaaaaaagctcatcatcactggtcattagagaaatgcaaatcaaaaccacaatgagataccatgtcatgccagttagaatggcaatcattaaaaagtcaggaaacaacagatgctggagaggatgtagagaaataggaatgcttttacactgttggtagaagtgtaaattagttcaaccattgtggaagtcagtgtggcaattcctcaaggatctagaaacagaaataccatttgacccagcaatcccatttctgggtatatacccaaaggattataaatcattctgctataaagacacatgcacacatatgtttattgcagcactgttcacaatagcaaagacttggaaccaacccaagtgcccatcaatgatagactggataaagaaaatgtggcatatatacaccatggaatactatgcagccaaaaaaaggatgagctcatgttctttgcaggaacatggatgaagctggaaaccatcattctcagcaaactaacacaggaacaggaaaccaaacaccacatgttctcactcataagtgggagttgaacaatgagaacacatggacacagggaggggaacgtcacacaccagggcctgtcatgttggggaatagcattaggagaaatacctaatgtagatgatgggttgatgggtgcagcacaccaccatgacacatgtatgcctatgttayaagcctgcacattctgcacatgtatcccagaacttaaagtataataaaaataaataaataaatatgagaaaaacagtcaatgttgaagcatgtcttagaaaagagaaggtgtagaggtaggactcttatttcaagctgttaaattagaattttgccttttttttatgttcttaagagctrgtaaaaatgtagctactaacttgctctgtgaccttaaacaaatcattcaatgtctggacctcagtttcctcctctgtcaaaaggttgcarttggatgacatgattttgtagttccctttgagctcaaaaattccacactctaaargaaagaaatgtaaactgactcatcattattccctgggctcaaatgatgttttctgccttagattgtcttaatacttaaaacatttaaatataagaaagggaagatttgaatagtctttacaagttgaatttcaaatggtttagaagatgcttagagatgttttcagaaagaattatcaagaagagatcactcagtaagtgcacagcctgcctgaagggcagccaagttatatacataaaaatatttaatgtgagcaaggaagaaatacaaatcctgacagaatagaattcagacatgggaatgattatttccagtggaaagaatcagggaattttccatggagaacatacagtcccagcctttccagactttaaaccattcagtgaacaaggcactgagttgggctctgtgaataagaaattttcagttaaaacacagaactttcctttctagagttcagggtcacataggagaaaccatgaagtggacagacgcttaccataaagtattagaaaactctacgagataaaatttactaaaatgctatcacagtgcctaggacctagtgtttacccaataaatattattatattttactcctattgtcatttttattgaggtaagcataagatactgcaatggattgtgtaataggcaacctatacagattgggttgatcaaggaaggcttcccagaggtggtaacatctgaaataagttttgaaggataagtagaagctgagttgataaaaccttggcagcaggaaaatgaaaaggtattccagtcagaggatgcagtttgggcaaatggagtatgatggaagagggcacgtcatgttaagggcctgcaagaagcttgggaatgactagaaatcgtgtgatgaggcatggcaagaggtggtactttctataaataccagggctagacctaaagtccatttcatgtcattttaagtagtttgggttctggtttgaaaaggagagaattgatgaaggattgtaaacaagagaaatattaactcaatagaatggaaaatgtacttaattaataaggacaaacttgaaagcaagagatcagtaaaaaaaaaaaaaaaaaaaatattgcaatagtccagctgacaaattgaggaggcgttgaattaagttctccttgaactaattacagcagttctctaacagtgagtgtcagggggagaaaggagacaagaggtgtttatagctgaacagaacagtactcggtgcctagaggtgtggcgtaaaggaaaagttgaggatggcatccaagatactggcttagactatttatatcacgttgatgtagtcttttgaggatctccatgcagaggtaaccatcctcatcagatgaaaaatatcttggttggcgggggtggtgggggtgggcacagcttagcaacttgtagttgkttttttttgtttgttttctttgttttgtttttctgtttcggggaattgaaatttttttcctgtcagaacaaacacagctgtgtcttatgtttcagaaattatgtaggtgacttacttgcttttgacatttttcacctttcttagagttgcattattttaaacctgggagactatatagtggagaatgtaccttcccctgcatcccctgcctcggagccatcctacaccatccctgcctataagagcaccctttaatgtaggaaggygaccaataagtagctgcataaaaggacacaagtacccagaaaaatgctcaggctggagtcaagacgttggctgcatcatcacatagggagtaattagagtcagggagtatattagattacacagaggaaatataatgtaagaagagaatcggacaaaggacagaaacctgggagagtaccaacatttaaatggctgtaaaaagagcaggaagaattgctctagttttattgcctgagctctcaggacttctcaaagtatttacggaatataacatatgggaccaagcaagtcatgatgttcatttccaccacaatcatcagcagcataagcaaatggcaaccatgttgtaaatgatggcttcataggcttattctgattacccagctttttgaaatttcatgaattctaagcactgtcacatttcaagaaaagcaaatcagagaaayattccaagaaatatatgttctagcctagttcacatctgggtggctgactcatgccaagccctactgaatggccagaaattgatgggggtagggatgatgagacagcgctgcagagtcattaacagtttccttctacagacaagatcagttctgcaagtagaagtgaggagttggcgagtttgctaatgatggagaggcctccatggactcatctgtctagggaggtgaggtggggagatgctaagamaagayaaaggagttgacagcttctgtgaaattcargtaccactttgattccctgattgttacaagaagaatatttgcctccccaaataaactctaaattccgcaaattgatgcaacatgccaagagcacctaagagtgaatttgacatgttgcaagtactcagtggtttctctttctatcccaccaaggactaggttttgtatttttcttcctacctctccttgtaccaagaagagagctgaggaactattgagaattcaataaatacctgattgaaatagtgcttgttaaggaaaaatatcaagaatatttttgcattaaagaattaaaaattttgggttgatactttgccaatgttgatcctttttcagtactgtagacttatttaaactccctttctcagaagcactgaatcataggtgtgatgagtgagtgctggatttaatcgtagcttaggcccctgggactgcgccttatgaagacaaatagtagacataataataaaattaaaatatttcttcattctaaatttagaaaatgactgccttctttttgtaaatgataatggcttgcaaagcagttcaatctttttagctatgtaaatggtataatacagtttaaaggattttttaattaaaacaattggaagcttcaaatatagactgcattttccaatttttacaatgctttgctcaaaaaggcagagcttaaaatcacatatgactcactgcattgtttcaaagccattacactcgaggtgtgttacctccatctggcacgtagagccacatgtcctggtgttcattgccgtttggtaggtagcatgtgtttataaacagaatatcaacgaaatggacaatacttggagagtttacctaagttttgttattttttaaagagatttaagattgttaaacttattatttaaagggctctgagtaacttttttttgcatttttaaaataggtcagttttattctgctagttccataaaaacaatgtaaacacaagcattctgtacgtcttgctggtgaattcacataatgcttacttagttccctgatcctttgacctcctcatcttctccagttattttctgtttggaccacgggccacaggagtggagtgtggttggggcttaggagacaggaatgtagctttttggtatgactygttttattgcttgctctcggtgctgagtaacttctaaaataagaagtaygtagaagctggccaggcgcggtggctcatgcctgtaatcccagcacttagggaggcagaagcaggcggatcacctaaggtcaggagttcgagaccagcctggccaacatggtgaaaccctgtctctactaaaaatacaaaaattagctgggcgtggtggcaggcgcctgtaatcccagctacttaggaggctgaggcaggagactcacttgaacccaggaggcggaggtttcagtgaaccgagaccacaccattgcgctccagcctggatgacagagcgagactcagtctcaaaaacaacaaaaaaaagacagacaaaaagagagaaaaagaaacaaagaaagaagagaaaaagaaacgagagaagaaaagaaaggaaaaatctttgggccaggtgcagtggctcatgactgtaatcccaacacttagggaggctgaggtgggtggatcacaaggtcaggagatcgagaccatcccagctaagatgatgaaaccccatctctactaaaaatacaaaaatacaaaaaaaaaaaaaaattagccgggcgtgatggcacacgcctgtagtcccagctactcgggaggctgaggcaggagaattgcttgaacccgggaggcggatgttgcggtgagctgagatcgcgccactgcactccagtgcagacagagcatcagagggacagagcgagactctgtctcaaaaaaaataaaattagaagaagttaaaaaactacatggaagtggtcattctaaatcaaactgcatccctgcctattaggcctctgaatcagttcctacgcagttggatggcaaagacaataaacaagagccatctaagacatggaatgttattatgactattgttaagaaagtaagaatttccctgatgacctttgtattctcatattcgtaggaggtaagggatacgaccatggagtaatggttcatttagcatgatgtgtgtatatgtgcatgtgtagatatttggcataaaaaatgcctattcctcatcaggagtgattgtgtaagtaatatcctagtgagctctcttctgaaagtcctggtattgatgaaaattatcagttgggtccacccatttcagaaaaatttctgtaacaaaaatatatattaacactggacttaatagagaaaaaaaacaaagtcaagaaaatttgctgagaaaaatacaaaggcacaaaatacatccttttaatccttttaataagtattaacatgaagatttaaaagaataaactacacacgaattctctgcctgttaacagtatgaatttgatgttaaccactaatcccttctcactagcgtaataacttctcctttgtgaagagagactgggattctatctgtctttgttccttgccaactttcccttttattgtttttattttgcctcctcttcttctgtgtccagttttagatctcactcatccattccaatgcactttggactgtttatttaaatttaccaaagctgatatattaattgcaatggctcccccaagattatgctggacttaccacatcaaaatttattgggaggctagctgtggtggctcactcctgtaatcccaacactttgggaggtcaaggtgggtggatcacttgaggtcgggagttmgagactagcctggccaacatggtgaaaccctgtctctactaaaaatacaaaaattagctgagtgtggtggcacacacctgtaatcccagctactcaggaggttaagttgggagaatcactttaaccagggaggcagaggttgcagtgagccaagatcgtgccacagcactccagcctgggcgacagagtgagactctgtctcaaaaaagaaaaaaaaaatgcgaaaacttttgaaaaaatacatattcataagccccacatcctcatgctcagatttaataagtccagaaactggtactgggaattagcctttagcctcccaagtgagtctgatgagcagatatgcacaataatcattggatagtcatgtgtgtgaggtatgtctgtgtgtgagagaggagtgagagcaagttcaggaagctttaacacaggaagaatcactgcctaaaatagaatcaagttcatgtttctggtatagataatagttctgttcctactttgaatgtacaactatcttctaatgtgtcaatgaatagcctcacagattccagtggcaggttttctagaccttcctggtttgagacagaaaagaataacttcggccagacgcrgtggttcacgcctgtaatcccaacactttgggaggccgaggcgcgcggattgccwgaggtcaggaattcaagaccagcctggccaacatggtgataccctgtctcgactaaaaatacaaaagtaagcctggcgtgggggcgtgcgtctgtaatcccagctacgcaggaggctgaggcaggagaatcgcttgatcctgtgcggcagaggttgtggtgagccgagattgcaccactgcactgcagcctgggcaacagagggagactctgtctcaaaataaaataataaataaataaataaataagaaaatggagaagcttcttaggaataatagactctgttgtgtcatgttttagtattctgtcttatatcaattgcgtgtaaatgcttagaacaagcttgtccaacccacggcccatgggccgcagcccattggtctaggatggctttgaatgtggcccaacacaaatttgtaaactttcttaaaacattatgagatttttttgcaattttttgttttagctcatcagctatcattagtgttagtgtattttatgtgtgacccaagacaattcttcttccagtgtggcccagggaagccaaaagattggatacccctggcttagaggaagggctgggtttgtttattaatcattttgatcaaactataaaaatatgaccaagatagatattttcaatgtttttcctcattccaaatacattgcctccttagtatttaagaaaaaatattgtcttaatatttttttttggagtctcactctgtcacccaggctgaagtacagtggtgcaatcttggctcactgcaacctctgcctcctgggttcaagcaattctcctgcctcagccccccaagtagctaggactacaggtgtttgccaccacacccagctaatttttggtatgttagtagagatgggaatttgccgtgttgcccggggtggtctcacactcctcagctcaggcaatctgaccacctcggtctcccaaagtgctaggattacagctgtgagccactgcacccagcctcatttttaaaatatatatgtatacacatatatatgtcatcttgttaacattatatatatatactcctgattgtaacaagacaatacatgcatacacacgtatacatacatgtgtacatgcatacatgcatgcacatgcatccacttatgcatacatgcatgtacatctatgtatgcatgatacatgcatgtacatctatgtatgcatgatacatgcacgtatgtatgcatgtatgggtgcatgtatgtgcacttgcatgtgtatgtattgtgcatagatgtgcatatacatggatgcatgcatgcatgtatacatgtatgtgtgtgcatgcatgcgtgactgcagttggatacgtgtatacatgcatgtataaatatatacacattagtgattccaaaacactataaatgtgattatacctaagatgaacatctgtatatggaaaaaataggaaaagtgagatgtttctgcatgacacagcattctcagtgcacacaatgccctcattaatcagcaggttttgctaagctaatttttagaatgaaaactataataatagagcaagtctgtatctaaacaagaaaaataaactagagaaaaaaatattgcatggagtttggccaacagaaattagataaatctggttgaattttttttttttttttttgagacagggtctcactctgtcccacaggctggaatccagtggcatagcctcggctcactgsacctccaccccccaggttcaagcgattctcctgcctcagcctccctagtcactgggactacaggtgtgcaccaccacgcccagctaatttttgtatttttactagagacaggatttcgccatgttgaccaggctggtcttgaactcctgacctcgggtgatccacccaccttagcctcctaaagtgctgggattacaggttgaaatttattaaactgcagttagataacagctctcatccttcttgactttgcagtattatagagaagagcataataaagtggtaaaaaggatctgcatacatccactgtgggtttagaaatcctcagaaataaacttatgttccctacgatgtgtggtctttttcagtcgaactttgtaggtgttctgaggtttgttaacagaccattcctaattaaaaacaaaaatcaagcaaacaaaaagcaacaaatatgacttgtactagatagaaattagcccgtgcaaatggccatagtaatacaatctgttgtgttagagaaagtttggtccacaatattgtgtcataaactagcctttgggtgattcctttaaagtatccgaatagaaatatctgaaatatacaatatttcttcccaacagttggcatctagttaagcaaaattgtacgttttaggaaaagcaccttttatgcatccagagaaggaaagtgtgcaatatgttttctaacataggctacaagtaatcactatatatgcatgcatacacacatacacacacacgcacatacacacacactctctctctcgtagtgctgctcagtatcaccctctacagatgaggctgttatttggtctgatatcatttaaatgctgatgttctaaaagtgaaagggctgaattttttttactgctaaaaatccctcaaatccactgtttaaaaaacagtgcaccatgctaacaaaaagttccaaaggtaaggctaattttctgacaattcattgtgtacttccagtcttgggccttttctactttgcttgttctgtctccctttctaggccaagagaggatctgctttctctctattttaagagtttgatttcagtatgttttgttagactgggtcggtcagcaggtgtgcactaacacattgcccaggtggccacttaatgcagtgtgattgagcatggaggaaataagcaacctttctcagtgcatagggctgtctggctgctcgagcaggtgagtgtgattagcaactgactttgggtagaggttcccctgtattcccaacagatgtccccttaattgaaagcttgttgtgacgctgttgattctgaggcccgaaatcccccttaatgtctcttgcttgttaaaaatacacctcccatccttgaagagagaaacttgcttaacagttacacaggtgtggtgggmgaatgggcatgcacatgcacacacatgaaaaataaacttttaaagtgaaactgcaaatcctttactgcctttccatcaaatggtctctagcaataaaccttgaggtctgaatcatgccattttagcaaatgttccatttaattatgttctggaataaagcagtgcaacacatttataggtgcatccttcagaattgtatagactgctaggattgtttgtttatatttatagtccattatattcagaaaaattagagcatattgcaaaaatacagaggacaacaagagttctccagattggctgagaaaataggggtgattaaaaagaaaggagagaaaagtaaaaagaaaccagagatgagatatgtagacaaaccgtgctctgagtttcctgtttctgattgttacaagtagaccacagcttagacctgtgcttccttgccccagagcaaagaggaaaatagaaacaatctgttatgtaggccgggcgcggtggctcacacttgtaatcccagcactttgggaggccgaggtggtggatcaccagaggtcaggagttggagaccagcctggccaaaatggtgaaacgctgtctcaactaaaaatacaaaaaaaaaaaaaattagctgggctggtggtgggcacctgtaatcccagctactcgggaggctgaggcaggagaatcacttgaacctaggaagcagaggttgcagcgagccgagagcacaccactgcacttcagcctgggcaaaagggagactttgtctaaaaaaaaaaaaaagaagaagaagaagaagaagaaataatctattatgtgattctcattgcctatacaatggggattgtaaaaaaaaaaaaaaaagaaagaaaatgtcaaaaacaagtctttgtgcagagagaaaagagaggcatttatcccatgaggcctcataaagagaacacgattatatgcagaatttgcttgaaccctgtggtttatgtgcactgtttgctttggatatttgataccacaggaggttttatgagaaagatttagtcatgtgctacatgcattgatatatgtaaatatttcttgtaattcactacatttaatagaattcattttatagctcgttgtttccaatttgaaacaaaaaatgtaaagtcatgagttgtgaatggttttctagagggaatgatgtcaggcattcaaggaagtattcattcaaatgcattttttgagcactatgtgagctaccttgctacttttgattatattaagcagatttcactgggtttagtaaagaaggataattttacaactatatcactgagaattttataatctacaactctaaatctctgttctatttcatagtcaaacttttctaaaaggcctctctacacactacctccagttcatcgtcactaatttactcttccacctattccatattctagggaacaccccttatttcagtgcccccayttaccccatcctctccttaggcttattatacaatattctcatagtgtatccactactttctgactgtgattttcagatttgttggcagggtcatgtttctgatccagtcataattgtcataataaatgtcataattgtccaatgattaattttaggacttctctctctmtctctcctctacagtaacccccttcttccttccctctctacctgtgctgatggcttccattaacatctacatgctgttgactcccacattattctttctaaaccaaacttctcttctgagtcccagactgtatatccattgataattccacttagatgtcactgagycatcacaaactcagaaaatccaggataaaatttctgatctttgatataaaaccttgggcttccttagtgttctccagcttagtgaatgtaaccaccagctatcaagttgttcacatcagaaagacagggatctttctaaacaccttcttytccttcattcctgtgtccaaagtgatgattaattatgtatgtcaacttaactgggccaccggatgcccagatattgggtcaaacattattcagggtgaatctctaagggtgtttttattagatgaagctaacatttgaattggcagcttgctcttcctaatgtggatgtgcctcatccaatcacttgaaagcctaagtagaccctttctcaactaagaggaaattttttcctgcctgattgcctggagctgggacattggatttttttctgccttcggacttgagttgaaacatcatctcttccttggtctcaatcctgctgacattcaggctacagctgccgcatcagctcacctaggtctctagcttgccagctgtagctcttgggatacatatgtatatgcacatatatgtgtgtgtgtgtatacttgtaaatatgtttgtatatatacacacacacgaatgtgcacacacacacacatatcacattgttccgatcttctggagaacccccactaatacatgcagtggtccacaatccccgttgatcttactttctatatatgcctcttgttgtaaatcacatcacctaaattcaatggtcaccaccagagttctgtcttttacttatattagtgttgtagcatcttcgaccttcattgacactggttttcatctaaactattctctgtggctagtggaagtggattcttcaaaacgttgatctcattatgatgcctcctcgtcacacacacccttttcttcatcatgaaacttgcaaaggctttctattgtttttaggataaaaatgaaaatcctgagcatgacatatgagactctggatagttttgtgtatatatgtcttcaaactgctttcatattttcctctcttagagagctttcttagcactgaccacactagatgttttatagttccttgaacatgtgttctcgtacagggttctggcacatgttttgtgatttagttccttttgttattcacatgctttcatcacatatctggtatactaaggacaggatggtagaagtagtctgccagggtgtaagcaataaaggggtgtgttgtctgcagaggatctaaaaacaataataaaatccagtaaatgttagtctgctttttattggtaccttaaatcatcaattctaaatggtgtctctcctgaataaatcttttgttggtctaaattctaaactattgagtttcaatattcacgtacacttcaaattgtttaaaattatgctttcgtaagcattatattctatgtggaagttaatttgtagaactcctagttacattgtcagccctcaacatggactcagctacacatatttgttcaaatatgttcaaactgttataattctataacagttcccaatcattacagcttgcttcaggtccagatttatctcracccctatcactctacatatttctgagcttaaagagtaagttttaaataaacaatcatagtgcagtagttgtaagtgaaagaaataatttgacttgcttcagttctgcaatcctttatgaccacctggagtttttatttctgtttaaaagttcaaatggcaaaacagaacaaatggcaaagtgtaatattgttatttggtaagaacaaattttagttcacacaaaatattttgcttaatttgagtaatatcttcaaaattcaaatgcattcttccttatttattttaaaattaaagaataattaaaatagtaattgttaatcattattacattaaaattattgaaaacaattttgtcatatagaagagaaaggtgttaaaatcatccactctagaggtcaaatccctagacatgccactgcatgaatcatgcttcttttcttcagagcactgactttcaattttagtacgtattcattagtctgattgtataattaatctctgaatccatgaccaaactgaccgttctctgagaataacagcaccatgtatcttttcactcaccattgcattggcagaacctagcacaatgctagcatgaagtgagtacttagtaaatatttgttgaatagacaaataaatgaacaggtaatacttagatggtccaggatttaatccaagactatctacccccaaagcaggtcataatcacaatacctcactgactkccagtctcatcttcattgtccaccaataagtatacgtttatttgcagaatattgatagcatgaatttcttcactctttctagtcactcttcatttggaagacaggaaaggtaagggaaagtatggggaatggggtagggaaagtttgccttaataagaagctcattcttgcaaaacgcattcctaaatttaggtcagaataccaatgtatagcaattaaatggaagtcactcattataatacttttttatttaaattaagaaaaaaatatgagctatgccagatgtatgcagactcagaatagaacccctcatctgtaaataatatactttgcttgatttttgaggcttgatataaacaaatggatgttgcaaaatgctttatttattttttatgtaggtttttacctttgatatgtttgtgaatatccaacagagagatgtcttcagtaatatgtcttacaaaggcggattctaaaaatagtaactccaaaggcaaggaatactcacgttttatcttacaacaaggaatactcacattttacctttcaaatatttatgaaatacatggtattttcttttttatcccattgccaattattgcaaacacacacaaggtaaagtttactacatgtgccaggtaatgttcaagtcatgttcataaagtttttttttaaagaaaattctgtggtatttatgttgaagagaagaaaagagaattacaaaggtgatattattgaacttctcaaaatggcggggtataaattcataaatcgttaagcttaagaacctaaaagacttttcaaaatagattaatgggaagaatcatcatcattataattaacatttgtgtagttttttatgcctcacaaagcagtttcatatctcatttgagctgtacaacagtgacttcaaatagggacataggtatttacacctctgtttctaccatttaggaacctgaggtttagctgtggcaactttaccagggttctacagaaattcaacaagccaaaagttcaactcagataatttagctccacacttaatttccattttatttaactaaacaatgaatatattttttaaaaaattatacatttcctgaattaatccattgtctttatttttagtaaaaccttttctctaattttaatagctttataggggtataattcacataccatacaatctaaccattataagtgtacaattcaatgttttttgtatctattaccacaatcaggctttgtagcattcccaccaccccaaaagttcctgttttcagtcagttcccattctcaacctggtcccagacaacctcagatctgttttctgtctccgtaggtttgtcctttctgtaaagttcatataaactgagtcatacaatgtgtagtattttgtttgtgtctgacttctttcacttctcatgtttctgaagttcatccatgttttagggtttatcaatggtttgtttcttttcattgctcgttattactccattccaagtatatataacattgtttatccattcaccaactgatggacatttggtttggttcccgttgggtctataaagaataatgctactatgaacatttgcatacatayttttacatggacayatatttttatttctcttgggtaaacacctaagagtggaattcctgggtcatctgccaaatctatgtttaacattttacagaattgtcaaaatgtttttctgaagtggtatgttatttttcactaccactagtaatgtatgagtattccactctctccacatccttaccagtacttgttactgttagtctttttgaatatagtcattctagtgggactagggttgtatcgcattgcagttttaatgggcatttatctaatgactaacgaagcgagaatttttttattaatcattcatatatcttctttgataaaatgtctgttcaagccttttgctcatttttaattgagttstttatcttattgaagtttatgagttatttatatcttttggatataattcctctatcagaaatataatttgcaaatattttcttcatttgtgggtcatttttcactttcttaatgccaccctttaaacagaaaaaaaattaaattttgctcaagttcacctattgctttttaaaaatttttatggatcatgtttttggcatcatatgtaagaaatctttacctaatctatgatcacaaacattttctcttgtgtttccttctaaaaatagtatagatttagctcttacatttgggtctatgatttattttgagttaatttttgtgtggagtttgaggtaagtatcaaaagtgttgtcattcattctctctttgtctctctctctctctcacacacacacacacacacacacaaaacacacacacacacacagacacacacacgggcatccagttctcccaacccatttattgaaaggaccatcttttcccaactgaattgccttggcacttttgtcaaaaatcaattgaccttaaatacgagggtttatttctggagtctcacttcggttctaatggtctatatgtctcttctcaggacaataccacattgtttatagcaagttcttaaatcaataatgaaaatccttcaactttgttgttctttttcaattttttggctattttagatcctttgaattcatataaattttaaaattgtacaaaaacatgcctgccagcattttgactgtgttgaaatgctgtgccagcattttgattcagattgtgttgaatctacagataagtttgaacgagaatgaccattttaataatagtgtctttaatcgatgaatatggaatgtctctccattaatttatatgttcttaatatctttcagcaatgttttgtagtcttctgtgtacaaggcttgcgcttcttttgttcaatttatttctgagtgtttttatcctattatgaacataatttttacttagtttcacttttggattgttcattgctaatgcatagaaataaaattaatttttgtatcttgattttatattacgtaatcttgataaatttgttttctagttctagtagattatcttagtccattttcttttgcttataacagaatatctgaaactgagtaattgataagaaatgaaatttatttcttacagttctggaggctgggaagttcaaggttgagggagcacatttgctgaaagccttcttgctggtggggacctcctgcagagtcccaaggcagtgcagggtatcacatggtgaggggctgagcatgctagctcaggtctctcttcctctcttgtaaagccaccagttccacatggtgataactcataaatccattaacccaattattaattagtggattaatccatttgcgagtacagatccttcatgacccaatcacctcttaaaggccccactctcaatactgccacattggggattaaatttctacataaaggccaggtgcggtggctcacacctgtaatcccagcactttgggaggctgaggtgggcggatcacgaggtcaggagatcgagaccatcctggctaacacggtgaaatcccgtctctactaaaaatacaaaaactagctaggcgtggttgtgggcgcctgtagtcccagctactcgggaggctggggcaggagaagggtgtgaacctgggtggcagagcttgcagtgagccgagattgagccactgcactccagcctggacaacagagcgagactccatctcaaaataaataaataaataaataataaataaataaatttctacataagttttggagaggacaactgtttaaactatagcataaaattttctggtagattctctaagatgttctacatgccagatcatgtcatctataaataaagacagtgttacttccaatttttctttttctttctttttttttttttttgcctttaatatctctctctccatctccctttcctgttcccatccctatctctatctctgtctctatctctgtctatctctatctgtatctctatctctgtctctatctctatctctatgtcttccaccttatttgatgtttacatggttccagaataatcttgaataaaagacgtctttgcttcttttcaatcttaggagaaamgcattccgttttcatcattatgtattatgctagctgtagaatttttgtagatgtcctgtttcaggttgatgaaatccttatttgcttagtttgttgaaagtttgtatctggaatgggtgtttgatttgtcaaaacttctttcatacttattgaaatgatcatatggctttgcccttttgtctgtcaaggcttactacattaattgaatatagaaaattaaaccaaycttgtatgttaaatttcactcgatcaatatatataattcatttttatgtgggtagatttaggttgctaatattttgtgaaaaawtgttgtgtctatgtccacaagcaatattgctttaaagttttatttttatgtgatgtctttgtttggttctggtatcagcataatgccagcatcatagaatgagtttgggagtgttctgtcttctattttctgaaggagtttatgtaaaaatggtgaattgatataattcactagggaaacaatgtgatcttgggcttatctttatgagaagatttttaattcccagctgaatttattttctttttgtaggtctattcaagtttttctttttgagtcagttttgctactgggtatcttgcttgaagtttgtctttttcatctaagttgcataatttgttttaaagttttccataattatatattttatatcatatgtaattatacataattattatatataatttattttcatattcatgtcaaattatgagccttttaattatgaggctgtagcattaataaygataggtcttctttctgtagttgattttagtaattactttctcccttttattcttggataatcgagttaaaggtttatcagttttcttactgcttccaaagaataattttctttattatttttatatttctttaatttccaagctgatctttacaatttactttcttatgtttgttttggggtttaatttgttcttctttttatagtttcttaagatggaggcttaggttattgatttgagacttttctccttttctaatatagatgtttatagctataaatcagcctccaacattactttagctgcctcctaagtgttttgtatgttgtgttgttattttcattcagttcaaagtattttctaatttcttttttaaatttcttctttaccccatgggttatttaaaaatgtgctgtttaatttctgtatatttgggtatctcccaatttttttctgttgttgatttcttatttaattataataaaacaacatactttgaatggtttcaattcttttgaatttaataactttattttctcctgtgaattttagctactcattaatgtcattttctttcagcctgatgaaattcctttagtgtttcttacagtgcaagtctgctagcaacaaacatcttagtctttccttattttagaatgtctttattttgctttcatttttgaaagacagttttgctgaatattgatgtcttggtagacattttttcagcagtttcattacaacattctgctgtcttctggcccccattgtttgtaataaaaagtcagctattaattgtgctgctgcttccttgtatgtggtgagtcatttttctcttcctgctttcaagattttctctttatttttaagatttcaactgtgtgaccatactgtttctagatgagactctcttagtgcttgttctacttgtgggtacttgagcttcctggatctgttgatagttttcatcaaaatcataaagtttcagctattrcttcttcaattttttctgctccttttatgtatttttcttctgggactcatattacatgtatattaatacacttgctttatctcacaggtccctggagctatactcatttctcttcaatcttttattctctgctcttaagattgaatattttctgttgatctctttttagaatcactgactcttccttcttacacgtcttattatatattaagtccatgtagtaaatttmtcatctttgttattgtaccattaaacacaaaaatttccatctagttgtttttaatagttgctttatctgtattccccatttgttgattcaatgctgtgtatttttcttytwtatatatatatatatatwttttttttttttttttttgagacggagtctcactctgttaccttggctggagtgcagtagcacgatctcagctcactgcaacctccgcctcccaggttcacatcattctcctgcctcagcctccygagtagctgggattacaggtgaccaccaccatgcctagctaatttctccgtttctttaaatrctattttattccttgaacatgtttataatgatagctatttttcctgaatagaattcatattgtcttgtttctttgcctatccctaattttatgttgacaaattcacattttagataacatattgtggcagctctggattggatttttttttcctgagagctataattgtttctattattttttgttgtttatttggtgtgtttataagtatttttcctggatttaatttgcagaatctatctctattgtagtatgcagttgctagcatgcctgatgatgtcatctgctgatagatacatatgtgggttgagaaacatatgcaaaatttcggcagttttcaattctgtcctaacttttactttccactgggcccttccaggttccccttgcatatgcacagctttccaggcaatcagtgatggatggaaagtttgggccctctcaagtctcctctgcctttgtgtgagcttgcagtcagccggggatgtgtagagtttagcaagaccttccatggtgctctcatttttcggatctccctgttaaacgtctggatagtcatatagtctgccgaaaagaccacaatttaggctaagagagctgctgttgggagagctccccaacataatagaattgtcttagtgacaagcagaggaaggtggaagggagcagggacaaatgggaggaaccccaggcattaatgccacagattcccactattagtggaatttcagcactttttacaagtaaatcctttgcaagtggttactttttacatttttgtataggatgatgtcttaatttttaaatatttcttacaatgtagtacgtcagtgtatcatagcattatctcatttacttctttgatcacctcttgaggtagataattaatttctgttttacaggtgagaaaactgaactatatcaagacaaagtaacttccccaaagttacactgatgaaaaatgacaaagtcagaatctatctacagtgcactctcttcttaagtcactcaaactaattgtaaaagaatttggaacaaggtagagttaatttgctcaaacaagtgcttaaaaaaacagtgcttagctccttgctatcaaacttttaaacttctataaaccatgactataaggaggaaaaaaagatgtttgttttaatggcactcaaaaggataaaattatcatctagtcaggaaaatttccaaactcagggcrtaggtccttacaaatatttaattcattatgtttgtgttgcattcatygcattcaagaaatatttgccatgtgtctctctgagctttggacgtacagatttatctacacatatgaaaatgaaatgtaaagctaaactatgctcacttaagactaaacttggaaaacttaaactttggcattccaaatgaagctggtctatggtgatatttatttttgcatttggtaatgtgtagtataagttagcaayacagacatgatttgtttccttaggatcattgtgaataaactcgttggattgggaaatatcctgtgtcaagacaaattattccaagctagcctacaatggaagaagggtaggctaattcttttctctctctccatttttttttttttttttgcgagggagtctcactctgtctcccaggctggaatgcagtggcgtgattccggctcactgcaacctcggtctccctggttcaagtgattctcctgactcagcctcttgagtagttgagattacaggcactcgccaccatgcccaactaatttttgtatttttagtagagaaggggtttcaccacattggccaggctggtcttgaatgcctgacctcaggtaatccgcccgcctcaacctcccaatgtattgggattacagatgtgagccacgacgtccggctggctaattctttatcctctgatgtgtgcttatagtcctcatcttttttgcacattcaaaggaagtgcagtgcatctggagggccataatgtacacagaaagaaaatagcacttccgagggcaaccactgagagcctacgggaagaaggccaagggaaaggccaagtttatacatatctatgaaaacaggaacagaaatgcaaaccatggccaaattaaaatcatcacagaatgctttactttggaactgcttgatttttctgaaacataaacattggattgatttgcatgttacataaatcctttagcttcatcttgacttttagccacccaatcagagatgactggtgagaatgaccttaaaggtagacaatgttctctttcatttttgtatactcataattctaatcatttgtgtcatttaaatcttgaagtgtttttcttctaactctggccttattttcttacaatcttgccaagtttcaagtttacatcttcggccaattttaatgtgtatgcaaaccaaaaatgtccaaacatgctcatttcagtggaaaaatgtgtgtgtgtttttatatatcagaaacatgaaatttagttgagttgatttttacctcaattatatgaaaacatgcattatgagtgtacaatcaaatataagattttcccaagtacatttgttattttagaaaaatatctacagaccacagtaatatacgattatgtgttttgcaaataatatttaacatgaccaactaaatgtaatgtgtagctttttttttttttttttaagagtctccctctgctacccaggctggagtgcagtggtgtgatctcagctcactgcaacttttgcctcccgggttcaagcgattcccatgcctcagcctccagagtagctgggactacaggcatgmgccaccatagctggctaatttttgtgtttttagtagagacagggttttactgtgttggccaggctggtctcgaactcctgaccttaggtgatctgcccacctcagtctctcaaaatgcttgaattaaaggcatgagccactgcatctggcctaatgtgtgacttttgattggatccaagtttgagaaataagcagctatacaatttttacaggaaatttgaatatggatatatattacataagagcatcatatcaatcttaaatttactgagttctaaaactttrttgtggttatacgaaagaatgtcctagtagttcttaggagataaatgctaaattacttaaaggtaaagtgccacgatgactaaaactaactcacaaatgttttaggaaagaaagaaaataaatagcaataaaccatttgttgcaaattattcacaattggtgaagagaatgtcagtgttcactgtagcattattgcaacttttttgtaaatttgaaatttttcagaataagaagttgaaaaaataaataatcgaatcataatatcataatatattccacatgtaagtgaacacgtttagacttcttgctttacaaatctactatgagacactgccttgagccatttttcaaaataaattggagggatataaatatgtaaatatgtggaacataaaacartatttaagtcaaccattattaccatgaactttatgcaattcacttgtaggatattgctttacagagtagtcttttaaatagtaatcaaatttcccataattttttaaaggtagagaatcagaacagtttgttagttttactgataaggaaactaaagcccacagaagataattacttactataattcattaatatgtagcattgaaatatttttattcgtttttattttaaggaggtttacaaaatagtttggggatacttcatgtcaaaattgttacttacagtgcaacaacattcatccttgttgttgaaaatttttgtcaaacctactgatttgaagcttttgaaagtgattgatttaatccaaatgcatacctcctccaggaggacatacaacctggaaaaataaacattagcaggaatggyaatactttaaagacaggataatgatgctaatggatgactaaaagttggcttcacactttttctaccaatcatgraccttttctttgaatatgttcctgagtcagtcagttgcttagtgtaatagcatgtggctaggctgaaaaactaatagtcgagtactatgctcagtacctgggagatgagatgattcatatcccaagcctyggcgtcatgcagtatgcccaggtaacaaacgtccacatgtacctgtgaatctaaaataaaatttgaattaaaaaaaaaaagaataagatagatccctaagccacttatttattacgtggccttaagcaagtttcacaacagatttggattcctaaacgtggtgagattttcactatttgatgtttcattattcaagataatttgaacaaaataagatttttatcttcattctaaattcattttccttacttcccaaaaacttgtgaagccttcactaaacaacaaaacaaacaataaagcacctaagcccttcattactactattaaccttctgaaaaatcttaacagaaatagaaattatgattaccttcgaatgatgattttgaagactgaaattgtaaagatttcaaatggcattttgaaaattcaaatagattttttaaccaccgtataccatgtgttggacagatttgccaaggcttatttttcttttttcctacaagcttatgatctatggtgctgtttcttaaactttaaagtatatacaaatcatcaaacatcttgttaaaaatgcagattccaggctgggcgtggtggctcatgcctgtaatcccagcactttgggaggctgagggaggtgaatcacttgagatgaggaattcaasaccagcctggccaacatgatgaaaccctgtctctactaaaaatacaaaaaattagccaggtgtggtggcacattgcctgtagtcctagctacttggcaggctgaggcaggagaatcacttgaacccaggaggcggaggttacagttagccaagatcacacctctgcactccagcctgggcaacagagtaagactcagtctcaaaaaaaaaaaaaaagaaaaagaaagaaaagaaaagaaaaatgccaattccagttgaataaatctgggttgggtcatgaggtgtgcattgctaatcatctctaaggtcacagtgaagttgctgktctaccaacaacactttgagtagcaacagtttctgtcacatgacagtgtcataaacacacatatacctagaaactctggtggaagcctaaatgagattaatattatgtcaatawgtgcatagtatatgataatacagtaatagactcataaataactgaatagagattatgcatatgggatatctgtgtgtgtatgtgcaattstgtagaaaaaggctgactggaacactctatctgaatcccttatttttcaagtaagaaaattaagattcagagaatttaatagatttatccagaattgttgacacaaagccagagagctggtacttgttcctatgcctgtgtctggaatktcagagaaggatttcatcatcttatatgtatgaaaatcattagtatgactatttttgttagagaacaaaaggaaattataaagtcagaccaaggacagcaatgagatctaraaagagaatatgctsatctgaaacaatgaataatgtgatgcaattacactcatttcaagtaatttattttctgatttaggatacactagcmtggctaattaattgggagtagccagagaaagaagggraacagctaagtgctggcaatcaggagacctacgttccagcctctgctctgtcactactttactgctgagagcttggataagttacttaaacttcatggagcattttgcatttgtttttcatctgtgaaatggagataagaagtgttgccctacttatcgcatgctgctgttgtgaggcaatagatgtaaacamatgtgcaaaattaacagtgctctacaaatgtatcatttttaccattatcattaatatttatgactagtcattcatattgatggaaatagttcactgtcataattgaggaaagggaattttgccattggcttgtttctttctcttctggaacttttcccagccagtttaggtggctttctgagctcagactcttacccatcagaaacaatcagagtacagaagatgcaaatgttagatttgtgtcgtggtatacactgcaggatatgtgcagagctgttgagckccaatgaacccatgaagctcactgaaaactctttggcttctcctttttctgttccttgtgttttgccctttcttagtaactgttcaaatgcccttcttgcatgtgtcctgatactgtccttttcctccttttttctatatccccttttccaatctgataaagcctactgatatcaatgctatcatcatgtacttacctgtacttaggtcagcaagacatttattacttttgaaaaatgaaaattaaagttggatggaattctataaagctgtcagttttggctttcaaagccaaaaatattatatcaatatgcctactaaaaagcattgctgaaatcttatgctaaaccaagcatttgttttacaactgcaatcctaaattctttgggaccattttcccccacatttaatgtgtgttcagtgctaatttggtttattcactacaaataagactgtctttctcagcattttgaagattctacagaaagaccttatgtcactcatactgctatactatcattactacagcatcatgacyatccccaacctacttaaatatatcaatgtaatccaaaaggaaaattggtggagcaccaccatgcagggtcaaattctgggcaaacagtgacctgacccaaggactgattattttaaaattaataatagtgtagttctgaaaatgaacagtttggaccattcactccatttacaatacaaaatttgggtttgttctttattgtttatgattgtgccattttattacagtttttagatgagcaattaaaactcttgaaaactctagcaaaatccaaaacattattttgccatcatgttctttaaatgtcaatatcttcattcctgtgcacaaatattttaatggtatgataacctgttgcctcctttaaacatacattttgatacattaaaagggatatttgtattactttctaatggtgctttttcaccaaggtaatacctttgaacctaattattttatgaaatatcattttaacaaattatttatatagtatgtcatataagtccgctcacggccttaaaaatgaccaacagtcgttgaatagaatagtccattactcagcttracaatgcagttttgatacacatctacactgaccaaagattttagtaaaaaatttaagaaagaaaaatgatctcaaaaagaagatgtgttcaagcatgtttggaataatttggatttgtttttccacaaagattcatgtttccaaatcgtttatytgctcccattctaaaaactttaacaaatacttgttgctctttgaatgtctagattttaaccggatgaacttctctcattttactctactctcaaaggcaacatgccgactgccaagcactcacccacaaggatacctaaaacatgcatatactagcatctgggcgaaatttagcaatccccattgtgacacattgcaaatgcaagtgaaaggagaaacgttcacttttgtgggttccaggcaactactccagtctaaacacaggctgtttcctttaaaaccaccctcaacaaccttcccacaactgctccttgccatgaaacagctaccacttgcaggatggggggagcaaaaatggaaacaatctgtttagtgcacttttccagaaaatttctgctttgagacctttctgacaccatccaagtattacctgcagttgctgtttatgcatactcatagctgggagatatgccgatctctagttgaacaacaaaaatgcggagacacaatcccatcccttgaattgtgcaactgcttgaattaatgtttgagaacacagtcaattttaaaaatacgggaacacagagtccattatgttcaactcacttttgttaaagagggcatgctacctttagttttcaggtgttgtaagtcaaaggagaaatgccagttgagggacccaggttcagaaatgataattacggtgctcttggattaggcctctgtagcaaatgcaagatggctttataagccctgcccagcagataaacaatcttttttttatcttgcctggttctccgttagctctgcagctctctttaagagagaaaaaattatctgatacagaaatttatgaagggagacatttgataggtggatcactgatgcagataatccaaaatgacaaattttcatgaagtcacttttattaaaatactccacttatgttccattattgcctatttgccttcctagttatatttttgcttttgtcagtgagttgattgaaacatgaaaatagtctttttatatataaaacaaacatgtcttgttaaaaaataaaatctatcactttatttcccctacttaatatgacctttcacagatgacttctctgtctgatatgcatggtcctccaaattctgtcccatcataccagtgttagtaataattgaacaatatttgtcatcagtgggggaaaaattaagctgtttcctgaggtttgaaaaaarttgcattgagatcttattygtgccaagtcttatggattagatactcaattaaagtagttgatgtagaaaatataaaatctcactcaacctctgtattttaatttagtttttgaatgctattttatatatgtaaaatgtaatgcaatacttttattaactcattattattttgtagttattcaattcaatccatataaaatagaaatctggattgccayctacattgtrtaaataatcaccaagagtagaatgagagaacagtcaggctacctgggatggggtcagtttgtacttaggttttcctctgccaccatcaccaaactttcagttttcttctccttcccctctatccccaactctttgcttccaagtataggagattcctggggctctcagatagttattttaaaagaaaaaaaaaagttcattttctctcagagttgataatgccactgagaggcacacatccttatataaaagagaatatgagtaaaaatggataatgtcctacaaatcatacataagagttgagggcatgagaagactgacaagggatgaggaggggaaactttcaggaaagagagtgtctagggcagagaagtgagaaatggaaatgaattaatagggaagagtggaagaaggttaatggtgaccatatttcagctaatgaatcagagaaaatgtgtcatgaatgttgatgcaaatctttaattatgtagcatcttacagtttacaaagtacttttgccatattatctcatttgcttttcgctaaggttccatgatataggcagatggggtgttactaatcctcactctgtaaataaagagttggagtgccagagaagtttggtgccaatcctgaagttcacacagtaagaaagtgacaaggaatcaaatgtttatccaactcagcattctttccagctgtgtgccccccatatctcaggttgccaacgtctttaccagattcccagaggaggctctttacttctggccaggtcttyccatcagggtaccctgaaagcattgttcaggttggtactgagtcctgggttcccctggaggtatgtcccactaagaaatccttgtctgtgttgttttactggtgcagacagctcatggcgaaggccctctctggggatatcaaaactctctaggtccaggttcaaaatcttccacacattctctgtgtctgcttttagccagacaccatcactatgtggtagcttacctcaaagcttcacttagtgtatcaascctcagaagcactttctgatcccttcaacctgcacatctgtcttcttatctaaattccagcccagctcaatccataccttctgaccatgctacgaaaaaaaaacatctctttgtaaacttctcttatgcttattgtcttttcactcatttagctatgagtcagtctgcatgtaccttgagatgagtgtctacgacttacgcttgttcgatattcccttcagcagggaacccacaggcatttaataaatattccttgattgatagattttggcctctgtctctacctcaacaaaatgaaatattatggctatattgtaagagtttcataatgaaaatgatcatcagcaaacataatttatcctgatgtatttcacagtattgtagatatattaaagtttctcctatcaaaagcctttaatttgtttttatctttttagaaagaggcatttattcacttcagttacctatataaaattagaactaatctacarttctctttcttgatctcaaagcaactgtaggtatgcttttatttttaccaatttgattggaattatcaactttgggattcatttctgatgaaaaataacctgaatctgtaatattaactctaaaggaactaaagggaatgttttatgtgcctgtgggaagctttagcactgtacaaattaattgcactcatctataatctttctgggagttacgtatatgcaggccaattgaatcatgaaattaaacctgaaactattcaagtcacacagactatgggatgatattatctcagaattacctactcctcttcattaatctattgataaagtaaacagttttattatcttctgccccagcatttgtttgtggcaataactagttccaaaatttttactaaaattagatgttaggttgtgattctttataatgaaatttcattcatcattgagccagtgttgacttttgtgttctatatgctattttatgctattttaagcttgggtaaaatttctgccatctatattagtttcagcaaatgaacaaaccacaagtctgtcctgttcttctgtattattttaagcttaatgttattagaagctattgtgattggagacaatggaaatcatgtccataaccaattctgaaggcaataggaaattgagaaagtagttcaattaacagaagcttcctctgcctttttaaagaaaattatatttatgtgagcaggctttctccgtgcaatatagtctgcatgtttaaaaggcaatcatttcccccagtttattcacttaaatgaaatcactactgctcacagtagtattcccttgtcttgccccatgtcaacactctgatgtgtggagttggactgaaaaaagataggaaatgaaattccacaagtgtgtcagatttaaaagagcaactggagttttaaatagctctcttgattttttaaggatttttacaagagcaaactacagggggcagcaaatattaacaggctcctaggagtgtgctgaacctcggaattaacaagtgctattcggctcaacttctctctgaagagaaatgcccaactttaatgtgaaatgtatagttttctcgttgctttagctttatgatatatgagagttaaatctagaaggctcttcctacctgtctttacacagtaaactaaagtctggaggagtgtctcacatttcagcagcactcattgtcttccccaaattctgcaatcaagtgtgacrtgctgaagtgacatggattaaaaacctgggattatctgagcattaaaaagcgaatgcagggcacaggaattgcacacatatcggggagaggagaaagcatgctacaaaggacattttattctcgattttatttattcatagtgagttgaagtctgttggacttccctgaaaaatcttccacactgtttgaaagttctattatctaaaagatagtttccaactctttggtgtatttaaaatcaaactcactatcactgaatttccaaagtaaaactctcagtctctttttcaaaaggacagagagagtgggaacatattatccattaatagtgttgaatttgacttaygtttttattttggcaaccaaaaagatagagaatgccagaccctcttggaagggctttgatcttatcctggtgtatcttataaaatagtctcatagaggctttggggaaagtctgaaaagcagaaaaggaaacattgtcattctttcaactagctcaaatccccatgtttaaaaatatctacagctgctaggagggttgcaaagttctttaattggtaattaatatagttactaacacagtgtaagagtactgcacaagacttaaaggcagaagttgaatcagtttccaaagtaaaaagtgaaaagataaagcttgtgacaatatatatgcaaaagacagcactgcattgcagtgagaagtgaagagacttgattcctttttcggttttgccacaagcagatctcttgggctctctgggctccaaattgtktgttgtctctctctctgttgattggtgccatctactatttgtaattcttaatttaagttggttcctgtgttccttttttgtgatgaaatattctaaattaacaacaaggacatatcataaaaacaactataagcccatcaaccaagagtaaataaatgttaatacgccgttttaccccaaaactactttcctttttcaaatggcattttcacacactttgttgcaatatagcatacgttcagtttactaaatatttactaagtgtacagtttaatgacttttcataagttgaaaacacctgtgcaaccaaaaattagataaaaatataggacattacaagcatcatgtatgaccacatctatacccacttacagtttctaagcaccccccaacccccacattctgactcctatcaggatacatggacttttgtttttatataaatcatgcaatatgtatttgtcagtgtctggtttcatttgcccaaccttatatttgcaaggtttatccatacagtcgcatgcagttgcagacttttttttttttttttttttgagatggagtctcactcttgttgcccaagctagaatgcagtggggtgatgttggctcactgaaacctctgcctcccaggttcaagcaataatcctgcctcagcctcctgagtagctgggattacaggcacgcattaccacacctggctatttttttgtatttttagtagaaacagggttttaccacattagccaggctagtctcaaactcctgacctcaggtgatccacccgccttggcctccaaaagtgctgggattacaggcatgagccaccgcacctggcctagattggttattcttattgctgcctgatattccattgtgtgcgtatcttcgggtgtgctttacaaaatacaatgtgagagatacaatatgtttgagctgtatatcttttcttgtctatttttttttacttccacatatgcagatgtattcattaatgatatataaaattgttctgtgggatttgaatttttcataaatagttccttaccattcataccattctacagcgagcttttcttccctcaacattgtgtcataaatgtgtttccactttgatagatgcatccctagtccattttaacttctgaagagtggcccaattaatataccacattttcaaatgtgtatcttattgatggccacttaggttatatcttccttgtgcacatgcataagaggtcccccactgcatacctggaagtatgattgcatctttaccacattgtgccaaagtgctctcaaagcaggtgtagcaaaaagccataagagctctcactgctccacacacttgccaacacttgaaattgtcagattgctatttgtttgcttgcggattgttgggttttgtcaattttctgagagtgaaatggtgtttctctgattactggaaatgttgagcttgagcatcatggtcctttcttggtcacttcgctttctgtttctctacaagccttttgttttccacactcagctcccttctctactctcccttcgtattttgcaggtggcaacacagatttttatctctttctgtctcctgataatgaaaggtggctgctgcccaatacaatgctaatccattaaatgataatctgttcacatcttttccttattatctccaggaacatgcttctgttttaacctctcttgtcccatcagatttttttctctcttggtccgttcctatttgcaaaacaaaacaaaactcttcaaatgtcttctatcatatatatttttttcctttactcagcatcctaattaaatgtctaaactgttcatctcttatccaccatcaaacttcttagaaaacttagtttttcttctcatatcctgatgtctcactatagttggattcaactattccaccaacatggacgtcaagattatcaatgacatcttaatttcatgactcactttattgtctttatcttatttcacttccatagacttcatgcctatactctcacacttccttccttcagtgaattatctgtgtgcttttatttctctgggcctttgcatgtccactacttggtaaaatcttccctcctctcaaccttggaactagtggttctttcttctgagcttccgtagaactttgtctatatatatacctacatatatatatatatacacatatacgcacacatatatatatatacactcatatatatatacacatatatatacactcatatatatacacatatatatacacacatatatatacacatatatatacacacatatatatacacatatatatacacacatatatatacacacatatatacacacatatatacacacatatatatacacacacatatatatatattcaactttgtattattattatatttatccataataagagagattctaaaggatttatatttctgcatccccagtgcttaacacagattcttggaaaatgtttgtggcatgaataaataaattgggcaaggatttctgtggagtcccttccagttctaacatagtggttcagagtctgtgatgatgaagaaaggtcctctttcctcctgcactgactccccatatccatcggcacaaatggcctactccctgctagagaagtcatatgccagaatccaaggagttctacactggtctgaacaaaatttccatcacaagctgaggaaaagcagcgtggatggaggagttagtcatactgaactctcccatgctgttagggctggggtcagcagaggatcagaagaagcccggagtggaattctgtttctttcctttcatctcccaaacctcaagcacagagaaaagaaaagcaggaagggagggagtagaaaggggagagtatgtgaacgaataagaagaaaacaagcattcataaggggacgttaagaaggggaagataatcacaaggatttttagcccactcagaaaagcagagataaaattaagtcttatacaagagacatagacgttgatttagatcacctaaatctgcccaactccacgactgctgggattcccaaggtgattttaagcagtcacagaatgactttattttgcttccagtggttcctagaactctgtggcaattcctaataaatgttttcaatgcatttactcatgacaaagggcaccattaacatactacttggcccaattttgccatgtcaggtgtatgagtatatcctgcctccatcgctgcgtccattgcagggagaagaattcaggccattgtgtggctttcctagtaagaagaaattgctgtttttcagaattatcagttgctaattttgtatcaaattgtacgctgctaacttgtgcatataacaaatggctctttaatgtattagcattgttttttaaagatcactcttttccacgtatgttaaagaatgcttaccttaaaaaaaaaaaaaaattagattgaccaggcacggtgtctcacgcctgtaatcccagcactttgggaggccgaggcgggcggatcacgaggtcaggagattgagaccatcctggctaacacggtgaaactccgtctctactaaaaatacaaaaattagccaggcgtggtggcgggtgcctgtagtcccagctactcgggaggctgaggcaggaggatggcctgaacccgggaggcggagcttgcagtgagtggagatcgcaccactgcactccagcctgggtaacagagggagactcagtctcaaaaaaaaaaaaaattagattaattcaaagcacagaagttctgagagaggtgtatgtatcccatctgttcaaatacaggggctaattgattttccaaagaccttgatccttatttttaaagtgatacaattcacttcaaaaaccccatgacttacttacactttaaaatgataaagcttacctcatcagtaatcctaaaaggcagytgaacctggtctatgactgaaaaggcctcttttgcccatttcctctttgagacaggcagctgctgaacgtggccttctcacgccctcatttttagcctgctttcatgatgaagtaacaaatgaaaataggcaattataatagcaccttgcttcctagagaccaatgcttttggaaaaatagatgtactgtataaatagcagatagattatctgcttgcctrcagtggtatggaagacaagactctctcaaaggagagaaaagtaaaatataccacaaaataggaagaaaatttgttctaggaatggatatatttaagggaatctgaaaatagctgtctaataagtacattaaaataaagatctttccatgcaaaggtccaggctaccttttgtttaacatacactttttctaaccacattgattcagtcctgacccaaaagatgaagtctagctggtgaatggttctgtgtcacttgcaagtcttcaggcggagacaaggggaagcactatgaatttatgagaggtgacaagattcttgcctgaggccaatagtttcttayacttgtacacatccagatagaaatgtgagatggaaaacagtagtatctcttacttcctagcacattaagcctggaaaagaaactgtttcctgatgtatctaggtaatgttacccttctgtatttttcattctcaatccatttcatttgaattgctatgcaagtcttttattgtagcccttgataaagggcatacatgccaagttagatatttatatatttttgatgagaatattctgacatatatttattttgatcatatatctaattcaaatataggcactgtgaaaagggaacacttttacactactggagggaatgcaaactagtacaaccactatggaaaacagtgtggaggttccttaaataactgaaagcagaattaccatttgatccagcaatcccactactgggtatctacccagaggaaaaggagtcattatatgaaagagacacttgcacatgcatgtttatagcagcacaatttgcaattgcaaaaatatggaaccaacccaaatgcctatcaaccaacaagtggataaagaaaatgtggtatatatacaccatggaatactactcagccataaaacaaatgaaataatgacattcacgcaacctggattgagttagagaccattattctaagtgaagtaactcaggaatgggaaaccaaatatcttatgttctcacttttaagtaggagctaagctatgagtatgcaaaggcataagaatgatacaatgaactttggggacttgggggaagggtgggtgggggatcagggataaaagactacacattgagcacagtgtacactgctcaggtgatgagttcaccaaagtctccaaaatcatcactaacgaacttatccatgtagccaaaaaccacctgttccccaaacattactgaaataaaataaaaaattttaaatatatatgggccctgaattaggctgggtgatctcagtgtatgatttgctcattattcatttatttattaacacatatctattatattgcctactatgtgccaggaactttgctaggagctgagaattcaggggtgaacaagacatacatattacgcaatttctctctctttctctctctactctctctcattctctttctcactctcattctaccatctctctgtatttctggttttagtaaatatcatcttcaaaatcatccagatgcccaagtcagaatctgggaagccatcctagactaaagctttctcctcctcttcatttccctgcaatgaattccttggtttataccctcttgggtttctgcctggaaaactgcaataggagggacacaggtctaataatagatgggcaatgaatatccttattatttaatatcttgagcaacaaataaatattttacattcaatattacagttcatcttcccaataaccttataaggaaaggatattactgcctccattatacagataaggaaaataaagctcagggttgttacataagctgctctgggccttcaagttaataagtacaataaccttggtttggatgcaagatagttggactccaaagtctgtgttctctccactcctctgtcacatgctttgcatgcaacatgctattccctgattgtgtttctcactcatgacggttcccaggagaaacatcttcacacacaccattagctcatccctctgaggtgatattttatggctaaggtgaagcaccacagttagaagcagccataaaaataaccctcaaggtgaagcacttaatcttggaagagtgaattgttaggttgtagtctggtactgttgggaaacctttcataaaagcccctcttatgaattttggtttcacacgagggagacaatgtttgtcatctttttgttttctttgtctaaaatctatatgggactagaggagtttatttcatgttacctttttagtcaaggcaatgcctgaaaagcatatctaccttgaatttagtggtaagaaaaccattgggtgaaggtatatctggtatgctttcaagtatccagattatatcacccaattatataataaatgtaaaagcacttttaaaactataaatagccatgtaaatgaacggtattactatgttggtacataaacatagactttcacatagtacttgatgagcactcttgttttgttgtttttccacttttcagaagtawgatgatctcacttgtaagttccattgtatgcttgtcattttgtgtatgtcatggagtgatgagcactctttaacgaaagcaaaaggaaactaataccacttgattattctgttaaagagtgagagtaattattcttccttttaaattttcacattgaaaaacgcagctatttgatttaaaatccccacgtttgtgggtatatataatgaatttcctaatgtgtttcatgttaaatgcactggaagctgtggttttccaagaattgagatggttcttcctgtaagttccagtgaggaaacataagacttgacatcaaagcgctgatgtgtttgcatacattgctgaaagtggcggggaaataatcatagaaggtggacacttctgtgtattctaaagttttaaatggcaattgcaaaactgagtgacatatcaacaattgaaaactcttaaagaggtagttttgtgttctgcaagtgtagatttcattactgcttcctttgaagtaaaaatctcatctctttgtaactaggataggttttgaagaaacaaaacttcaagagctttagatgggcaataaaaaaatgttgtaatctcctacaggagagatgtgatttatagggcaacgtattttttatgacacattgatgtttgcaacagaccaggccagtaagtaagaagttcagatttaaaaggaaagagtggtgacataacttccctttacaggtgtcatttggcttaaaacaacttttgctcacccagtgactgaatcattttggatctgtacaagtggggtttgtataaaaattgttacttcttccatctatgtgcaggagccagcatctcactgccacgatggtttttaatgaaataggaataaaatgatctgtgcatgtctgtgtttgacagtggccttaaaccagtcttgggggtctcaaccacctaggtctctgccgtgagatactcactttaagaagaggcagcagaaaataatggttaatagcatgcgttatggagtctgacaaacctgggttcaaaagccacttttgccttatatgtactagatgatgtggccttgggcaagtcacttactgaatatttctgtacctcagttaactcacatgtaaaatggggataagaaagtcacttcagaagatgattttgtggattgagtaatgccatatgctttaaatgcttagcccaatgtccagtgcctaggaagtaatcagttaagcttcatattattttttagtcatttacaaaatatttattcggtawctaccatgaaccgaacaaaatagaaatgcagtttgtgtgtgtatatcttccaggaatgaagcatggcctgacaacgcctctgtattatatggaaatgtataattagagtttttaagcattttttaaccaccagcacattagcaaacaacaaacactattgcacggtgcagagtttgtttacttggcaaaatgtarataatgcagctgcttcacacaacagtcaaggggtagggggtgctgactgcagaaaaaattcagccctaggactatatttagttagaatgtgacatcattttaaaacttgaattatttaaaccatgcattttaaatgtttgttatttaagaaaactygagaaatcaagtaaatgtccccattcttcctaactgcatttaaccaactagaacttaaaacaaaaagagctataaggtaattaatttcaaaatccataacatctatatcatgacatggctatctgggtcaaaatctatgtcctggaacataataaccatatgctataaaatataatttatataacagcataggccaataaggtgagtctccatgctgtgcacagacattagcattatgaaagggttccctttcataactatggcaattacatagttagtgaaataccattaagcatatcttttcatgtgtagttatccctgtgtctatatgacactgaacatctgtatgaaaatcaaaaatttcaatcagccctccagatgtccccaaatatcaatatgtctggcttatgaacaaatcagctggacttaagtttttcatttcgttttcttccagatgttggtgtcttgtagacacaaatctctttttgagttctttcctaccaatcacctttgggattataaccaaattactaaaaaccataaaggtgtgtcatagtaaatatttttcttctgttgaaggatgcaattcatcaaaaatctgctaggtcgtatatggatgcaagttgttaagaatgtggcagtgaaaaacttaacacaattaagcgcgtggaaataatttggctctagaaataaaatgttctctatgttcataattatagaaagcatttgatctgacatgggtacattcaggttttctaaagacagaggcaggccgggcacggtgggtcacgctgataatcccagcacattgggagaccaaggtgggtggttcgcctgagatcaggagttcaagaccagcctggccaatatggtgaaaccccatctctactaaaaatacaaaaattaaccgggtgtggtggcaggcacccataatcccagctactagggaagctgaggcatgagaattgcttgaacctggaaggcagaggtttcagtgagccgagatcccaccattgcactccagcctgggtgacaagagcgagacttggtctcagaaaaaaaaaaaaaaaaaaaaaaagaggctgtgtggtataatggaaagacacatgtattggcatcagaaaatcttgaacatgagttcagattctgtcctttacttgtggcattgtgagccttaatttcttctatggtaaccaatcatcttagtttgccagggactctcccagttttatccctaaacatcccatgccctgagaaaccccttagtcccaggaaaatggatgattggtcaccctaatcctcatctataaaatgagggtaataataacttcctcgcagaggtttactgcagaatggtgaataagtaaaggacctagcacagccaagaagagtagggtytccaaatgggaactattatcatcattatcaatctcattcacatttcctattctgtttcctctcagagcacaggcttgtctgtttctattttattcaacacaatcagcacttcacttgcactatcatagtcatgctaattgattccatcccattctcaaaagcactaaatttctacgttgtattccccctcactgatggtcatgagctttacatcatcctcactggaatccaggagataactttttgtttcctaccatggagacttgatatatttctataatccagatgtgcagtatgtaacctccagtgcccacarcaagcccaacacatagtgggccctccacagatacttgtgaaatgaatgaatggttcataaacaaagaatagaaaactacaggtgagttatggcaaatcagtccagtaaacatcaaaatgtagcccttctctttgctacaaactcacctttctatygtggatttcaatttgcctrctgcagaaacattgcttactatctttcagaagtcaactagctatatttcctttccagaacagaaactttcggaatagctagtctagtctgctccctcccactctctggctccatagtgccttttggttccctggttgctcttctgctatgttgaggcctccaccagccatgtctagtctcatcacttagtccagctccaaactcaaagaacattctcttgaattatttagatttttctcttcaccttattctaccttctgggttactcattttcctgtgccttccacttcaaccaagttgtactcctgcttccaggcttcccaatgcctgcagtctcagaagttagactaaacagcaacaggcaatcgagcatcatccttttccttctctgtcttgcaactcaggactcaccttctcccagtttgccctaataggtctcatccaatgtttaacctgccatgacagtctcagtatagccattctctcagtgctggctgaaggaatcagatggagctaggttttgaataagtactgcgtttactgcagcatgacattaaatgactgctttcatattcccgaacctcaattactcctttggtaaaatggggataagaattttacttgtgataaaatgggaataagaattatggaaaataaatgaggyaacataaagcttgcccatgaaaattcattcactcccattcgtcccaatactcttatcatttctaatagtgtctctcttcactttcttaaaattctgtgggagaaaataattgtgaagattcttgaatgtatatccccagatattttgctctgcctttggtaggctctaatatccattactggaccggctccagaagggatacagaggtccactctgttagatctgggttgggaatgggattaggaccaaagcattcaggtggtgcaagtgatttgaaaaatgaaaatacaagacctgtataaaagaaagtcctcaacggggtctcttcagaagcacaggggagaaagaggaaagcttacactcctgacctctcacctcagcatttttcttccttccactttcaagcagtgaataatcaacatgtcagagtgcatttagatctaaatccaattaagtctgaccttagggatagttactcatagttcccagcaggtgtgtgtttggaagaaattgtcatctgtgccctttgttcaattttcaaattacccaagtttatggtcctgactgattaagtctaacaacactggccaatgaatgtctaaggagaacagctgctggcttaagtgtctaggcatttgtgctgagaaggattttaagaaagaaatcacctctctctacttactccacacagaacaaatctaggagttgaaaatattctatagctttcatctagacccttacgatagttgctatcatagttgttagcccatggttaacattatttaaccaccatggccattggtattatcatttgtgcagtgctctgcaagattgttgtggaattagaattaatatgtgtaatccaattggcacaatacctgacacatagtagatgctcaattagtggtactgattattaatataattggtattattaaggcatttgacaggaatttcaaacagcagaccagtattcactgtggggggaaaaaagtatgtgtgggtatgcaatgtatgtgcaagtgtgcatgtatgattttgaccaattttcacatgtatcttccattaatagcgcctattactttagattgacttcagaagtcatgctctaaaataccttttttttttttgagacagagccttgctccgtcacccaggctggagtgtagtggtgtgatctcggcttacggcaacctacacctcctggcttcacctgattctcctgcctcagcatcctgagtagttgagactgcaggcacccaccaccatgctcggctaatttttatatttttagtagaggcggggtttcactatgtcggccaggctggtctcaaactcctggactcaaatgatccacccacctcagcctcccaaagtgctgggattacaggcatgagccaccacacatggccctctaaaatatcttaatcacagtccctcagtttggtttctgttggccataggaggagaaagatgctacaaatgtgagtagctataaaggttctgaacctataaagattctggttctctgctaggtacttttcacacattttctcatctatttctctacttttgtgaggatcagaagacctggcttctggtctcagctttccctgcctacaaaactgtggtctacaacaaattacttcaccgcttggatctgtaattttgcaatctgtaaaacaagaagattggattggaccatttttaagatcctttccaaagctgtaagtttaaagtgagatactayaagatcaatataaaaataaatctaatccaggagaaatgaaatgaaaggaacaccactctgtttttagtcaatgagtcgacagtatttctttgggtgttcattcttctagatgctataaagggaaaaaggaaaaaagagaagaccttgttggttcttgctctaacacactttttccagactgcttttatctgctctctggttgacttctgagacatgatcctcaggactccagagctcttctcttctccacttatttttctaccagcctgtttgacaacagtcagcccaatcccacccagcaggaaaaaacatggttcttggtgagaaagctaaatggcaccttccttctcctttctttcctccgagtaagaagacaggaagaagctcattaagaatccagaagaatgtctagaaaggtaactgaggatctctctccattagaggaatgacaaaactgctacagagaaaactatggctggatgagtttttagatctctgtgactgtcattctttttctccgctgcttcttccattctctggtcaattctgtttgtccttaaaatgcaggtcttaaaagcttttaaaaactctgtctccaatggccccacctctcactctttccactatactatgcttccacacttttagaaaaacacgtacgttgaattatggttagttgtctgtatgcctgtcttttacttaaacttataccactgtaaatatatcagtayattgtgatgtatagtaaaccccttccattacagaaagaactaactgtatactacattgtaattatttacagaaatcttgtaaaaggaagatattctcatgtttgagaggaaaaatgtacgtaacttgaataaagcctaatatgtctgacctaaccaaatggatatattagaagtgagttccttacaaaaatattcatggaaaacttcttttaagactaagttttcctattggttattaatgggaatttataaagatttgactgatatacaactttttaggaataatatctgtcactagactgttagttctgtgagatcagggaacaaatacatttgatttctttcccattgtatccacagtgcctggaatacagtaagtgcttaataaatattataggcagaatgtataaatgacagaagaaatgaagaattaaaaatccctgctgcatatcagaaattacctttgaggccaggtacggtggctcacacctataattctagcactttgggaggccgaggtgggtggattacttcacctcaggagttcgacaccagcttgaggaacatggcgaaaccctgtctctacaaaaaatatatacatatatttttaataagccgggcatggtagtgtgcatgtgggaggatggcttgagcccaggaagttgaggctgctgtgagccaagattgcaccactgcactccagcctggatgacagagtcagacactgtctcaagaaataaaaaagaaaacaccatagagataatattataggcaaatgaaaccaactacattaaaatattttaattctatttatttgtgcttggataaatgtgttgttatacatatgaataatcgcttcttgctcatgctctaagatgaggaataacagcatgagttggcaaagggaaaaaaaaggtgcagtatacctggtctatttgcttgtttgcttgtctttgcagtaatgtaatgttatttcattactcccaataggcaccctcagattaaacagtaatagttagctctgaacatttagaattttactcaataaaaataatggcgttaaaatcagtaaggaggagttgatcgtatgctgtgcttcatcatcatcttcgtgaaagaaagagaaaaggtagaagcaagtgcctgtagatatccacaggtaacactaagggaggatgygccagacctagcattgaagccttcctcagaaaaaccaacttgagagaggatttacaatcccttcttatctctcagacagttgccatttatatgctgtttattcagtgattataaacatggctaccctcccagcttatatcaaatatcactaggtaaataactggcagaatatattgtgggttttctcagggctatgactgagaaaaaaatgccacctttgtttcttatggtttagctacttttcacccaggaatccctgagctgttatttgaaaggctacatttcagaccccacagcaaacataggatgtatgtttttctgtaaacagggtaacaagtagatggttgaaatgtttaaattgaaaactctgacttaaggagtcagggagggagacgaaaaaggctcactttctgccaagaggttgctccttttctgtgaactggaaggatcactcttctctccttacacattttagtgtacctagaaacacgtgtggggtgcttagagcagtctcaggaaatggatgactggacacttggcttccagatttggtccagcctctctccgtttgtgtttctatgagtaaagttgaggcaaaccctaatgagctttcccaatgcaagattgttatsccaaatggaaagcagttagcaggaacgctaagatccaggattctgtttcaaatcattaaaattaaatagtattcttccctccaaaacgtttaagatattttgataaatctataattcacaattgggatagggagtagacattaatcataaagggacctccaatactaaaataacaaccaggactcactgccactggccaatgagctccatgataatgggccagcgatctgactgtgtctttgttttctcatcattgtgcttctagtgttttgcagtgcctaccaagctcagtggacatttgagtaaatrcatggagaaaagtatgaatgaatgaatgaaaaaatgaatgcagagccaagcctattgggcccaatcacattgtatggtcagtactcattactgaccctctccactaatgctcagcacatttattttctgtgaaaccaggataacaggaacaatgaaatagctttgaaggagatttcccatcagtgtctcgatcacccatctctcagctaacagatcttattttcctgagctcatgctgggcccaagaaaagacaacatacgcctatagatacttggggacccaggcctctctctggaatacagaaaggtgtactgtttaaaggaagtgtgaatgcgtgtaacttaggcctactattccattctcacccagagtaaaataagtgttccacagtatcaacagagtaaaagttcatgttactgaccaggaaagcctggtgaacacagaaatgcaaycaactgtagcttgggtgaggtgtaggactgacatctaaccagagtcaccagggtatagctatggccattctttcttatgctatgcaccccaaaagggattataaagcacagataattaaatcagcagaggctgggtgtgayaacttatgctgtaatcccttcccaataactttgggaggccaaggtgggagaattgcttgagtccaggcattcaagaccagcagggcaagacctcgtctcttctaaaaataaaaataaaaaacaagttatctgggcatggtagcatgtgcctgtaattccagctactcaggaggctgaggtgggaggactgcttgagcctggaagtttgagaccacgatgagctattgatcacactgctgcactcgaggctagtctacacagtgagactctgtctcaaaagaaaacaaaaaaaaamgaaaagaaagaaagaagaatcagagcacttctgttgataataatcaacagagcacttctcttttctccttaagcatatgccaccccttcttacttacttttattcttccatttttgttccccaccatcccccaccttagccccacttactggttctgtctctttaatttgtctggctagttacagaggcagctgagagcacaatgggtacagtagtcattttatttccctccaagtattgtctgtgcccggaatgaagaattacacagaaggacatgttgtggaccaattcccctgctttccaatctcctacgaatgatcaagctcctgggaacactaagacacagtgtttcatacagttccttcaaatgacttcctgagaaataagtaatatctggcaatgtaaactattatcttccagaggattaatacaaaccacttctaagggctgtaaagcactttatcttcaaactcaattatataaagtgtatacttgagggtagaatgacaacctccttaagactaggattgtcaacagccaaggaaagagtcaaccctctttctttccatgctatttcaagtgggtcatgagcaacactttcctagagttatgcccatagacacctcgatttctacccagcatccttcatgggcttcatgtttaagaaagggagaattggattgtctgagaagagcctcagacacttgtttrtagtgtttaaatgggaaaagggtaaaggacaaaatcatgactctggtaactttgtctattggcctgtctcatttatgagtgtaaaatgtcactgaaggttatcattcttagaaaatgttgctgaaaaatgtgtcaagtttaatggagatctgaaagttcttttgcatttttttcctgataaacttctatcattttgtaaatagaagcaaatatgaacttttataagttgacctattgccagaaaataagaaacatcaaaagaccaaaataacaaaaagataatatgctcactaaaatattagaatctatttatttttaataagttaatttattattgctctgaattccttcacggtatgaaagtaaactgtcactataaaagtcccctagatattggtgtctcataaaattctaaacacaggtaaaaataaggtgtttacctattcaggtagattaaacaacgtttaataaactattaatttgacatagacattaccctgggttattcatgttggagtttttggaataaagcccagattacgtttcttcttctaatttggctcatacaaatgatttaaaacgtaaaacaggctgggcgcggtggttcacgcctttaatcccagcattttgggaggctgagactggtggatcacgaggtcaggagatggagaccatcctggccaacatagcgaaaccccatctctactaaaaatacaaaaattatctggacatggtggcacttgtccatagtcccagctactcgggaggctgaggcaggagaagcacttgaacccggggggcagargttgctgtgagctgagatcgcgccactgcagtccagcctggggacagagagagacttcctctcaaaaaaaaawaaagaaaaagaaaaaagaaaaacagggtggtaaaggaaagggccaaggaggatacattttaaaggacacatttgaaacacaatttactttccctaatatcagaccatggtcttgaactgtgtaacttttaaagacatttgcaaacttacttgcatttttaattcaaatatggaaaacaagttcttatttgcaaagggtacctggtcacttggtaaagttttactgcagtcataaagaacattaaatgttctgagttattttgcaattaaatttcctagatttaaatgatcagagtatattaacttagacttacgaacctatgaattcttcttgaatagatttctgccaggagcaaataatgaaacctttaaccaggaaatgacgaagctccaaattcttctgaggatactgtagtaaagtgattaccctggaatactatagtgcatgagcattacaaaggaggtttataggcatgtggagttttcagaactcatgacattttttcccacagaaaatcacattcctggtctatttccagtgtttaaaaggaaaggtaaactggcatttagtakattataggcttttcatcagcttatttggtttgatgactattcctaatatataccccaagtgtagtatttaaaaaaaacagtctgagtaaatttttacagctatgtctcatgagctgtttaaaamaacaacaacaacaacacacacacacatactcagataggctctcttggtttggattaacctggtacagaatattagaacaaaactggtggaaacacaaaatcaggccaattctatgctctattatcttaattatatgctcatttactgatgtgttgaaaagcagagatttatcagttaggatatgataaggtctaagtaagagaaaaatccaacaaaatgttacttaataaagacactatgttgtaagaaatccaggcatagggctacaggattggtgaattcagtgkctcggcatcataaagaatgtttgtgtgtgtgtttttccatctttccatgtcacaaaacaactggaagaagtggatctgtttttcctccttcatgaggaaagcagggctcagagaagttaaggcatatgcacaaagctactcagttaagtagctgagccaggatttcagcccactcttactaagtctaaagcttgttcctctaaccactctaaaatcatgaaatattatacattgtagatgtttagcattatctaaggacatgaggtgatgcttattattgagcataataatatayaagagcatccatacaactaaatctgcttatcttataactgtcaacttcctgtttctgctatattcttttgtaaatactcattgagatgtttaccttatgcttgaaataaggttataaatagttgtaatttcttaggtatcggatgaactgaagcacaaaggaaccaaacaaagaattcctaatgttattctgctagtcttgagttaagtgtattgtgattatactagaatttcctggtttgtagctgggactacaggaatgtgccactatgtctggctaattaaaaaaaaaattatttttgtagagatcagtctcattctgttgcccaggctctcgaactcctgggctcacgggatcctcctacctcggcctcccgaagtgctgaaattataggcatgggctaccacgcctgtcctagaacttccagagagctttctcatcaccatgagaaagagctacagtgataagcaattatgttatttatcataattaactttaacacatcagtgattgtcagtctactctttcatttaatcatccccaaaacttkraagggggattagttttatctccattttataaatgggtgactctctttaatgcatccatgtatggttgtgcaggttgaagactctaccactgatgagcacagccctatatttttgacttctcttctatgcctcccttgctccacctgagtgaatctcctctgcatccaccagaaaaatgttcttcatttttctgtcttgaaagtttcattggaaccaccaacttaggtcagaataaatatctagacattgtctcacacatttatcaaacatttcctaggagccaggctccgcatggtggtttcaagtaagtgatttgccatgstctgcacaatcacagtatgaaacaaatataattatctctcttttgcagataaagaaacaggactctggaggttttaacagctcattccatgacatgcagctattaacagaattagggattatgttctctcaactccaatgcaatttccattatgataaattagggaagagataakagtcattaggagaacaasgtaaccaagtacttggctggccagaggcaccaaggggattgagatgagggtgaagagtatgagatgctcaggggaggtgcagagtgaagagaaggaacaatattgggaaggccaatgacagacctttcccagtcatttgtttttcccagaattagactctgcaactaggccactttcctgtctctcccaggttcatttggtgatacccacgttgggaaattgcaaamaaaacagtccgttcaactgtagtcacacttgatgaacatctacgaggaacaaagaatgtcctggtctatcttggtttgaaaagaaaaataaaatctgagtttacagttgaagggtgcatatttggcagagtcaccatgcaagttatgggcaagtcactgaaccatgggccatcagtttcattaccgttaaatgtgggtagtaaaatgaaactattcataatggctgggaattgttattcattcacatatagggacaatgtagaaatgcccaaggcaaacaagtgttacattgttttattaaatttttaccctaagttcaaaagttatgtattaatcttttagatgtagttttgcccctcaaagtctggaaggacacaagtgttctgtccagtatgatagagactccgtattatgttttaatgaccaggtgcacacacatagtctagaaaatggtgcacaaatgcaccattactattcacatgggacagcctgtcagttartatggagtctaccctcaatggcctccaggagactatttggtgtcttacctccctctcttcatttcctgtcactcatatttctctgcagggttgcagacctacgtgcctgacaccaacgagacctagtcccccartgctttcattctttaaaatcaaccacttacataataaagaaactctctttttgtcactattgattaaagctcrgagtataatttccagccttcattaagatgaaatagatgacagtgaaaaggaaatttaaaaaagagatagagaaaactatttatttagcactcattcaaaagtcaaaactttctagctcttagggaacttggttaaaaaaaaataaagttaacacatatttataattgacctgttatgtgccaggtatcatcctagaaactaggggtataygggaaatcaatcctcttcaatccctacccttggggagcttatattctgattggggaaaaagaagatattaaagaaataattaaaacaaccacatacaacaygacagctggtaataatcactcagaagaaaaattaagcagggcaataggatagagatgaaggggtagtgatatttcatgccaaggggtcaagaagtgaggccatgtatataaagattccttcattcaatatttattgactgtctttgaagagctgggtactgtgcaagaygtaagatgaataagacatagtccctgccctccaggagccgacagctcagtggagagtctcaccacctgctccattaggcagacagattagaagtctcagggcatatcgctgcagtaacactgtacacagtgaccaatttgaacagattgtaagtattccaaaactcacagtggtttccataaaataaytctcacttcaagtaaacattttcagttggtgagtaactctattttccaccgacagcactcatatttgagggctttcttaatgcaatgatgacttgtttttctaattggttgccagggattgtttgggtccttattgaaatgtacttgcttaactcctccaaagcaacttggctggtttcttgttgtactggcaaatgccgcctcctgtactgaaaaatttgttctttctgaaaaatttggactgtccctagatggtttttattatgattaaagataagaaagaaagaatgatagatttatttttaaaaagtgataacagaacagactttacatcaaccagatttacataaatgtaggctacatgctagaggatgtgctattttatcctagttctatcacgstttgtgcagatacctggcccaaaattttcttattcattgagaagacagagaaaagtataattatggccaaaatactagcttgtacaaagctgttttctttattgtgtttttaatacaagctccatattcccagttttacacaggattgtaataatacaacattgttaacaaaaaaatactcaatcatgtgagagaacaacattgagcagagaagtcttttgtttttctgaagacagagcctttttgataggggatgggagatcatatcacacacagttgctccagagtaaaggagacagacttgctgatctctctgctagcacaaagataatccactcactctacaggctccttgttggcacctcttcctctttgcattctcactgtcacattcctcaccctttgccataggagacccaggagaggaaattattttggctacgctgagacataagcacaggtggtaccacttgttataaacttttcagtttttgttggagctataagcctactttataggggtcttgagctgtttgttctatgagagaaagggaagcaatagcttttggccctcaatgttgattgattgcattgcggctggtttccacaggctgctggcttgcagaggacacatttcttctcagtggtgccccagtacaatgatgccaatctgaattacatactggctacagccaaatatcttcatttcctttctgcttcaaacagtggatttgggcagttctttttattctgttttggagaaatgtcacacgaaattttgaattaagttaagctattattattattattattgctgtaccaaggtaaaatcaatttgtcataawttttgtcttttgcctacacgttggagtctttctcattggtaaagttttcactcttatcatggccttttacatagcagctcccactgctatgatcatgtcagctttaggggtaaatgacagagaggaattttgctatcaaagttacttccaaaggtcatgaaaagtcagtcactggataagatcaagaacttggttctaaatataaactcttcctcagcacatgcaaattataaagtctgctgaagtctaactctaccataaaatttcccacaggaactctgttccttcctaaatatttcattttctaaagatgttactcaaggtaaaatttactccattgaatcttaagtagctgattctagggcctatgtgtatgccccacatttccttagtgatcagatgstaacataaatacttccatttttcagctccgtgaactttcattcacagaatatactgcaattaagtagctttttagagtagtcttcccaaataggaaggatgttccagttgttggtgggtttggcttaggttatgcagtttatttgttttggttgtatgttttgaacatatgcccagggcttttaaaaagaatgatgggaacatttgtacaaatgaaattgaaagcaagggagcgggcattgccaacgctttaattatgaacctagcaacacgtgtacttatttgaaggtttaaagagtataagacagaaaacagggaaaggagggggcacctagtggtctcaaacgggatgtctgckttttcttctcagcaggcagggaataaaaggcataaagcctttctacccttttggatgcccaaggatacggcaaactgcctgtgtccttttcccaatatcccgttcgctttgaagcgctatcaggacagagggtaaagttctgagagagccagaggggccatttaggtcaggtgatctgagggttccacccttcctcctcctgcaatgcttccttaaggccaaaagagccagcacatcatggtgtgctgaactcccgtgtgtgtgtgtgtgtgtgtgtgtgtgtgtgtgtgtgtgtgtgtgtgtgtgtttcatgtctgtgtcttataaccctgttttctattgcctgagaagaaaagtgcccaactctttggaacctctcgtcttttgacagacaaatttcccagcaactgtaaccagaatagttggagggttgttacacacgagggcattactaaggttggggtggtgaaccaaaagaatttggaaagtttgagaaacagcaagatggggtggttgacacacacactttccttttcctttaattttgagggttttttcccccttgcatcttcaattctagtcaagtgtatttcattccagacataaaatcaaaatactcttctctccagtctctgtgtggattaggagtaattacaaggttaaaacaacattgtctcctcccttaaaatctgtagttttattctacaaaaggttattttgaggggtctgtttgactgtctttttttcatgttatatatgagatggcatttccaaagtagctattatgctgttctaatataatttaaagggcaggggatagctacctaagactgtgtcttttacgtttaaaccttttttttttttttttaactgatggaaagagatatataccaacacaaatagctcatgaccaattctctccctgagtatgacagctagaactagtggttcccaactaaatgctaaagcccctgaaatgtcccagcaggttgctgggtttgtactacaatgtccggtacaaatttcgtgtaattacagctgactgctgaaggaagcctgtgttctctgcaggctgttaggaccttagttatggccagaagggtagtgggtaggattcaaacctcctaccagtgccagcagctagaggctttcttcagagcagggacaactgactgtaagaataaaccagctgtgcagagcagaattacatagcttgtagatttaggtaaaatggtgccacctgtgattttttttttttttttccttttaagaagtacagaagaaagaaaaaggcaaatcctggaaaaaggccgctagcttcttaggaaatgccagaatctgctcactggatcattttcctgggagcaataaaacaaatcaataaatttgaattgagttatcatggtggttttcagaattacctsagaagcttgccaacaattctgactcctgggagctggcccagagtttctgattcagggtctggatcaatcaatgagtctgggtcagccataaaatcagtgttttgccacttacaaaattattaggagccttaaaagatatctcttaaggttctctgtgacttataaagtaccatacaaatgttaacatttaactaatagagtgtggatactgtacctcttatttgttaggcattatgttaactcttggagaaatccatgtgtcctagttgtaaattgatagttttctattcttagagttcaccaagaatactttcttctcaagaaaatgaattccttaagccaaaaattacaagcaatatctttctctctcagaagtagtagttttgttgttcctgatttaattctgaaaataacacaaaggcatyaagaatcaagactagtttcaatttgcttccaaggagggagttttaatctttccaattctttctttttttgtttctcttcttgttttaatcacagatttatttggaggtagggtggttggaatttaggctagtttgatggcatggcttcctattttaattggactgcaaagaataaaaatcattagaggatgtttgtattgtatttggataaaaagggttttccttcatatgtgtgccttgctcatagcccacattcttagaatgacttgatagtgcatagttcacatacctcacacacagtggaggtttgattgaatgagcagcgggatgaatgggcatacatgaaaactaagcaataagatatgctgaaagcaccacaggcatatataaaatttggactgcatctcatttgtagttactacttaaaaatggaattcagccaaaggatcatttctttttcayctataaaataaaagcactttcacaaagaatcctagagctgggagaaaaaaaagaaacaactttaaagataatctagtctagtgattttcgaattgtgctctctagagctacaaagcaaagttgctccaactttggctaaacatttgagtcactgggaagatttttaaaatatagatgctaggctgggcacagtggctcatgcctgtaatcccagcactttgggaggccaaggctagtggatcacttgaggccaggatttcgagaccagcctggccaacatagtgacacccccttctctactaaaaatacaaaaaaaaattagttaggtgtggtggtacatgcccctaatcccagctactcgggaggctgaggcacgagaatcacttgaacctgggaggcagaggttgcagtagctgagatcgtgccactctactccagcctagggtacagaggagactctgtctcaaaatataaacaaataaatgaattaaaatatagatgctagarcttcactcccagagaatccagttcagctagtatgcgtgggctgggcacatatgttttaaaaggtggtacagattctaatgcacaaccagggtggtgaaccatcattctacgggtttgcaagtccaaacatttggactcctgatctgataaatacaagtatgctccctgtagacaatatgatagaatatattaaactggaaaaaatgggatgtgcttgtgccctataaagttttcattaagttcaacaacaacaatgtaatctagaaaaattcaattatacagggttctattatacactcttatgataggacattctgcaggtgcacaagggatacacagaagattaaggcccattgttttccataaagattttacaaggttggcctatggcagaagcatagaaagaaaaagagaaaaacaagtataaatataactttaataaaaggcaggtgtgctatgaatggcacaggtaagattgaatcacagatgaaatattattgctttcagcatttgctctaatttctcatcactacccagcacatatytgaaaactgagcagttttgatatccatcgtcttagaacacgacctgttttttaagagaacggtgggtgcaaggattaaaaaggaaaaggaaaaaataaaacagttgtcctgtyccttcttacctccgcttgatttaaggtaggatatttcttagagcctgggactcacctagcaggaggtctctctgagggaggaaaagtaaaaagcatgagtgccaactgttcttttcagaacagtctgcttctagactgctggacccttgtgtctttgccaagggggagggcagagcagaacatctgcctcacttgatttgcttttgtgcttctccaggacaaagacttaatagtcagggtcatttcatctccttgcatggataatgaacaaagctgagagaaggaaagaaagggaggagaacaaaaggagagaaggaagaaagaaggaagaaagagaagaagggagggagggaaggagagatattaagagtgtccgtcatctgttgttcttcatattggtcttaactcagaatctttggaatttttttgttcccttcccaaacacaattatctgacacaagaacttgcaagatgtgattaaataaagaggcctttcaatatgtgattaaacataagtttgcataaattcccactaactccatctactccccgcttataacattttgccactccaattaatggatcgaactggtcattaaatatatcttggaggttagtgctttctattatcttttatccaatttcagtagaatattcagtacaagagagattcaaagaatcagatattctaatggaagtagtattcatatgtggtagaggaatcaggaaaaaaaaactgacttgatgagatgattcttaacggatagataagtattcaacatgtaggtgatcataagaaaactttctggctgagtaagaaatatggatagttttatccagacaatgctggaatttaggctattggtagaaaagaggtaaagattagaatggaaaaatgggctcaggcagcattccatttgtggtagatgtcgaatgctggtagaacatttgcacttagttataaagtacgtacttaatcatgaaccactgaggttttttttagcatgggagttacataatcaacttgtgttttattaaggttaattgggcagcacgttggggcatagattggggccaatcaggaaaacaatgggagcagaagaatatgcaaaagattattattgtattagtccagagaacagtagagatacttgtgttagaaagatgggcttttggtggtaagaaaaggaaagaaaacatgatcttaaagaactgaacacaaataaataaccaagcaggaatggtgcttctacatttataaaacaagcactaacatgaatagactatgtaaagtaatcacacagttgggaaagaatagttttggtttgccttttaaatctctccaagacttgttcagtgttactagtaattttggagatgtggccaatgagttttgaaaatcaggataacttccagtaatatatgttcctataggaaataatgtttacaggcaaatgaatgctctgttcatctaagaatataccaagttaaaaatgaaaatgtcaacaccagttagaagtataaaggattttttgtccactgaactgatcaaattcttttgacttcttgtaggaaagcatgaaactttataatyattctcatcaaaagttccgtggaactacgaatccatccactcccgttagactctattattattctttgtctgggacattttggtgtgtgttgtgattagtgaggcctaactctgaccaaactctaggtcgttgtacctttcagcacagtctcaataagaggcaatattaacgtgacatctaaccaggccacagtggtatctaagcacatgctatcatattttgcagcagaccttttttgagawctgcttctagtgcaggttctgggcttggtggtgatgagaagagtgtgaagacgctcacaatttaatagggtgaaattatacacaataaaaatacagagagataggaaaaaagaagaaaaggaaaagaatgagagcccaggagcaggggaaattcattctatttagtggactatacgggaggctttataaagacagtgatgtatcatgtaagatgtgcacctgacaaccagttcatttcctatttctatccttcccttcctttactttctgaaatatttatgaaatgcctattgtgcttaaagccctatgacaggagctctgggttccaatcagacatgaatcctgctctcaaacaactgtgaaaacattacattgagtatgtacaccaagtagaaattaaatgatccaacacagattcttgttttctggtttcttgttgtactggcaaatgctgcctcctgtactgaaaaatttgttctttctgaaaaatttggactgtccctggatggtttgtattatgattaaagaaagaatgatagatttatttttaaaaagtgataacagaacagactttacatcaaccagatttacataaatgtaggctacatgctagatgatgtgctgttttatcctatttctatcacgctttgtgcagatacctggcccaaaattttcttattcattgagaagacagagaaaagtataattatggccaaaatactagcttgtacaaagctgttttctttattgtgtttttaatacaagtgtaagacaagaacagaagtataagacaaagagaaaacattagaaaagtggcagaaatatagtagtcttgatgccttgctatattcactgttttgaaaactgttactgaatgcacaaggaaacacccccagttactcatggggactctgctgcatatggaaaacaaagcaagatctggagacagtgagatcctggcccaggatacaatgaccaacttgccactggtcatttataatccctgaactgcataggaatgcgctccctgcaacgtgaaaatcaacgtgtggtatttcacttctgagtgagttttttggaaaccatcctctgaaaccctgttagaaagaacctttaaaaataatttcatggttctgtgttagtgctttctttctaaaaatgtaagagctaaagttggttggtggacgcagaagtcttactagctttgaaaaactgctgtgcttcgtgttttactctcgtttatttctctcttcctaaccattgaatcttaaagcacattctttcattaaggagattcagcaccctctagagtagtggattgtgagtcattaactgcctgaagcatgtccgagtcttgagagataagagtcaggcttgtgcaaatgaaattttaaacaaatgctgcagtacttttgtatctttctcttaaacagtacaaattttggttgaccatggaaataataatattgaagttcaaaatttaacttccttttcaggttatgtcccatgatttgacatcctacagatagagaaacagagttttccttctttcaaagaatcctcctcacaactatctgtgattcatttccattgtgtttcccattcttgcgccattcagcaagatggagcctgtttcatcagtttttggtctctgtagagtgttcctttattcaatgattaactactagctttctggtgacttcttaatctttttctgtattttaaaatattccttcatttcagaattttcttacctaagatacaaacactaaatggaacataagtaactgcagttgctttcctccctaatcagctctgcctttcctactgaagatataatttaaaaaatgtatcaaaacccatgaaagttaaaactttaaaataaacactaggcaatttgtttcctcagtgaaacaaatttagaggttaaggtgacagaaatgtgtttatacctcatataactaacaatgcacccatttatgttagcaatagttttattttttaaaaatgctgcaaaatgtaaagataggtggcctcwaaatgtttatactaaatagaatgaaaaaacaaaaccaatacacaattttgttaggaaacactgaaatccactgcttaatgtatgcattaatgggccttcttgacaaatcacctgttaaattttagctgacagcttgtcatatattaattataaataagtgtaatatacagttatcataatgcatgcaacaaaaaagaaataggaaaggtaattagagtatatcctttgttttctcccttcacttcttgctcacaagaaaaaaatgacccagtgtttcacttgggttgggatagtgccaatggttaatggaatgccccagtctactaaagaatttaatgggaatatccatttgtcacagtcgcatgctgtgatctccagtagcagagccagtattgtcacagtcgcatgctgtaatctccagtagcagagccagtagaaaatagcattgtaccataacgtcctctacacactgcaggtgagggtgaagtgcagcagctgaacagagcagtcagtggaggaggtatggcttttctaggcctttctttatgaaagatgtggatttcttttttttattattattatactttaagttttagggtacatgtrcacattgtgcaggttagttacatacgtatacatgtgccatgctggtgcgctgcacccactaacgcgtcatctagcattaggtatatctcccgatgctctccctcccccccaccaccccacaaccgtccccagagtgtgatgttccccttcctgtgtccatgtgatctcactgttcaattcccacctatgagtgagaatatgcggtgtttgcttttttgttcttgcgatagtttactgagaatgatggtttccaatttcatccatgaagatgtggatttcttttcttaaagaggacagtgctgcctaacagcaagaagagatgctgccttgaagaaaaggaaagtgtatttttttcacgtggaaaaagaaagcataaatgattgcacaacatgtctcaaaatctccagctgcctccttttctactggaagcccacttgtttgtaaagaatctttgggtagtggaatcagaacaggtgatttcaatcatcagctagttctgagtttgagctttcaaatctgcagaatgggagtaatgacacctaagcatgcaatgttactggtagaatccatagaactacatgggtcaaaaaatttagcatggcaccttaattaatatcttcttttcttctttacaattgaatttgaatgatagggttgtctggctgctttttaatttattcttgagacagagtctggctctgttgcccagtctggagtgcaatggcgtgatctcggctcacttcaacctccacctcctgggttcaagcaattctcctgtctcagcctcccgagtagctgggattacagacacgtgccaccacgcccagataatttttgtatttttagtagagacgggtttcaccatgttggccaggctgatttcaaactcctgacctcaagtgatctgcctgccttggcctccaaaagtgctgggattacaggtgtgagccacagtgcctggccttttagctttcttatgtgctagttctgtgtttggccaaagcaagctactgagaaatgctgtataacttaaatttgaaaaatactctctgaaataaaaatagaaacacacgtagaagtgaatattgttatttgaggactgaaactattattgtttcatttatgtatttagcagtaagtcaataaagtgtattagacataagctaacacctacaggaaaaggtcttagatattagatttagtgttttatgaaattcctcactctcttccgaacatgtcacttgaatctatgctgtgtttctccatttagctggatttaataaaaaccccagtagtcctcacaaagaaaacatgattagcaacaatttattccataccttggtcaataatttatcatcactatagaagtgaaaatattggatttgaagtcaaacagatctaggttcaaaattctagcttggccactcactgtgtcagcttggccaaattacttatcctctctcgtcctgtttcctcacttatataatggggctaataatacttaactagcaaggcagttaagattggaaacgaggcagtgcttccaaacttttaatcactagccacatgatcaaaaaggaagttttgcaaaaaaaataaaaaaataaaaaataaamcaacttagtatgtataatgcactctgtgttttttcctacttttctttcatttcagaaattgtttatgacccactagattcgcaacccacataaggtcatgaagtgccttttcaaaaacaggtgaactttaacatgcttagcacgatgcttagtacataatacaagtgtaacaactgattactattattgtcatcgtgattatttttagtctcctgttaggatgcctcatgataaatgagaataaatcttccaagtacttctaggaactaactcctttggatggggtccaaaacagactcatactcatcgtatgctgaattatgcactagagggggtagtgctatagcaaagctcctgtgtgctatttatcacagaatgttagagctggaaggaaacgaagaaaatgtcttgtcctattgcttcatttttccttcataaaagtatttggagttttaaaaatattctatatgtattgctcattgataagttggaaaactggcttctttgatccagaatgtggaggtgatgatgaatagctggtgggatggagggcactggatcatgatgtctgagttcttgtcctgcttctggcaccaaatagttggatgattttaaattctcagggtcttcgtttctttacctgtaaaaacgaggtaatttcaacaaaagattagcytgcttctgatgttctttgacttaaaatttccaaatggtaaaccagtccagaagtttactagatgctgcagcattaggacactcttttgttgccaatctgctctgaatatattaacatgagtrtagcaggctgcagtctcacttccattactactcagatgtgcagagaaactttggcttctctatttgctgtatctcccgtttttcagcagcatcaccctgaataattctcagtctcattggtataataataactcagactctccagtcaccttgacccatccctacttctttctctaagatgtttgatgtttggttgtagtagagacaagaacatctaggacttcacagtgtcagaaaagttgggcttatgccatttacttgtactgtcctctgtatcccctgatttctgggtcccttttctacttgctagtttaaatcactaccagtggtgtaagatgatatatcctcaactatgttcccagatagcagtcagatttaccagctgggttcttcttaaatgaggtcagatctgcaggcagagtgatacatttcccacaaaagtaacagcaaaggaatattaggggttttaaaactttctgtttctctaacatgcaactttggatgaggaaagtgggattgccagtttatgggggcacatgtggcaatgacaaagccaagtaggagtttacatcttgggtggaatcacctatggggaggctgagatttctggatccatccttaggtcacagggggcaagkgtccatcatccctgcacagcttttcagctcctgtgaaatcagaatgattggagggtaaacctcgtttgaaggcttgcacaagaattgatttcttcctgattttcactatgaccctaaccataaaaaagcaaaaccaaaaagccaagagacaatcatgcagggatgctcctcccccmcccccaaattgctggaaaactaaacttcgtttagagagattcctttaaaaaatatgtgacttatttttggagtacatagggggcagaggattactgaccaatccttcggtggctttcaggagcacagcatgcagatggtggaaacaaatgggcagcttgagacagcagtcagcatgctggatcattaagtcaaatctaagggtgtctgtttacctttgctctttcaaagacagcccggagtctgcagggataagtattgtgtgtatgtgctggcctgaacacagaatgagcaatggaggtggctggtgagctctagctttactttatttaacctttctgaccaagtttctaataaattttgatgggccaactgccaatggtggcttccagctgccgactttttccacatgctggagaccctatgagtagtgaagaaggttaaaatccatctcttagctaacaatacacacagtgcaccttagtcaccttgggttgtgtggatgaagagtgcatagcccaacaactggatgcttgtctagggaagaggtgttatagtgtccttcagagaagctgaggagcactgcatttccaacaacataaaagcaagtggcatgaaagcaaaacaagttatcacactaagattttggttcagtacttcccagtcttcctcgytgccttcaaagcggatcctacaagcatccccgaaggaggctgccaaggtgaactggggcggacacaaactgtgtctcatcaaagcacgctccctatagtattatcactgctgtcaatagggcgcgaccagcattttttcctcctttgcgctgggacgcagagcaggaagcgcccgggtgtgcatctcttaggagatgagtgaatctgttggagagggtcttttctggcctggtggatggatgctggggagtgacgtcaccccgccccctcctctggtgtgtgtgtgtctgtgtgtctgtgtgtgtgtatgtgtgtgtgtgtgtgtgtgtgtgtgtgtgttgcctccttcacccacctctcctgcctgcccctcctttatccggctctctggccctttcagtgggtcagtggtccagattcagggattcgccagcgggcgcagcgggcccagctctccccgcgtccgggcgcacccacactcacactcacgcgcaggcaacgcgcacacacaatcccccagcgctggagcacagcaattccgtgggatccccagcacgttacgaggattttagaaatcacccacacaaggaaacaaagagagaagcctttccaatgactttcctgggctttttcgtttaattttcccccctccccaaaccacctcttctgcagccgtaactaccaggttcaagccaggtccaaagactgggctgcaccggccaccccacctcccggccctcgactctgctcgggccctttcccaggcgtcgcctcgcacccctctccccccacgagcctcagtttctggttacctcgcgtgcgcttcacttttggggggaagaagagaaggggagggaggcaccgaggggggcagccgagttgctatttgtggccaaagaatccgctttaaaagaagaggcagcaggaaggaggaaagaggagaggcggagggaggagaggagacgcggccccggaccccccagccgcgagcggcggagcrtcgaggagcgggaggaggaggaagaggaggaggaggaggagggggaggagacaaacagcggcggcggcggcagcgagagaagcgggcgcagggcgagcaggaggagcgggaggaggagaaaccgccgcggaagccgcgggctcagaagggccaagaggacggcccgggaagaggaggaggaggcggaggaggaggaaaagggggtaggggtggagggagggcggggggacgcgctgccttggatgctggatttcgggtttttggactcactcgctgactctcttccacttcctcgctctggactgggctggccgcacgagggctgggcggcggcggcgaccaggggggcttcggcggcggcggccgctgctccgcgggattaaattggccgcccggaggcggcggcgcggccgtggcggggcgcgaaggcgctggaggaaagtgttggcggcggcgcgggaggcggtggcggcggctgcccggggccaacatgaccaggtgagtccctggaactgaccccgtccgccccgcggtgtcttcccctcttgctgctccggaatcgccctgcgcccggctccggctgccggcgcctcccgagccagagcgacacgctcgcgtttccgcgagcccggcgcccgggcaccggagcgcacagtttgctcctctggacctcctcgggcagaggtcctctcctgctgggttcacttctcgcctgaaacctcagacccgggagagaggcgactctagagaatgggggtgtccgggtatgtgtatttgtgcgacccccgctctctcctcctagggtgggcgtagtattgggggcaaatggtggagcggtggggcaatccacccttacccagggatcctgccaccgccttttttaaaggcagrgattactgttttaaggagggctgactayggtgagggggcgatttctttttctttctttcctctgaactagtggggagaaggagaaatagcaggaatcaaagtctacgcagctgccatagaggagggggattgtttgggagaccttcccgtggcagaatcaaagctmgtagttcagctgcgggaatctggtgtacttaacacacacattcattccgtagggaagggaacgyatcttttataatgaagagtcaaagttgtaagaaacaatttaaaaagaaagccacgaacaaaccaaagattatttgctttcccatagatttattgtagcttttatgtrggtgtgtagaaaacttgcawtgcttctctggacgttgattttcatttaaaagcactagcaagtgaagtcagtttttaagtcttatgcttaaaaaaatcttgaacaccaagtgtgagcttggctttcattaatttggtgttccaggattccagatagtagttccattctccaaaaccaggactatcacaatccacttttattgtttccagttcgcctcccagtacgctrcttgccaaatgtctcctccgttttctaaaattctcagagtaatcccccagcctcatctacagtttgcaccttaagtatctaggaagattcctgagggctcgttctccttgtatttcctcttaaagttatatatatatatttacatgtgcaaagacacagtgccagtgacttaacagagtgtagctcacacagtttgaacctctcagaggctagtaactgcttatgacttgaaataggtttgctgttaaatttactgagctacaaatgtggactttatcctttggtgtattcttttctaaccatcctgtagcgcatctctggggacttagttcaaccatagatacttctgaccattttcagtatttttttctctgtttcaaagtgcacacaccaaccactcaacttgagtaaaacaaggatgatataccaaaacttgaaacattctgatgtaaagggatctgtagatgataataacttaagattaagttgtatatgtaatataataatacccagtaaaaggcttagtatcttacttactttgaacatatattctgctttatgctacagacactatagcaaaaagagaacacattttcaatgttccgtgtctgacttatggaaacagacatcctaaatggacaataaaatyttccctacctcccacattccataattatgtactgtactttgcttttcaatggagctagcaattctgtggcagatttcttaaattcaccctcatgctatcagctattattgtactttcaaagtgtgaaattgacaagctggtcagtttcatgaattcagctgtcagwttgtgtccagttaaaaattgctaaaagctgtaaatgtgcctgcctggaattttcttttgtgaaggaaggacagcaaggggatgggggattaatgggtgttattaattgtagatctttaaaaatagatggactccaatgtgagttgtatcactggctgttactgggaaatacgtttagatttttactcctgtaaaagtggcattcaatttttatctgtatcttattttaaatagtactttgcatagaaatcatctgttcttatggccctcagtaatatataataggaataagattcaaataggaacactgtctctctcaaatatattttaatatagttgagtaatgtattatttttgcatgacatgtaaaaaggtggatgaattaaacattttattgtgtaggttatgtaacacagattcttcttgggccagagcagttgtgcagttactcaagtaatgaaatgcagcaatttattttaatatatgtgcgttagagtagataaccatagatgtaaaactgcttaaagtattaaatacagtgatttgatttgccttttaagattgacacttatttaaatccagaatatctcaaagtctggaactaagaattggaatcccctcatctgctgctatttgctaagccactaggggcctgtataactgttcttatatccaggaggtatcctggtatggcatatgcaaacccttcctagagagacattaaaaaaaaaaaaaattcargtaggcattcccccaagtttttgttttttcctttttaatacattaactcatattctgatactagttatagacaatgattgaagactatttcaagaattttatttagggcttctctggcactatgattttccatatagagtgtgaaaaatagaaaagagaaaaggtattggtgcaaattcatatgtgattccagttctcagtgtatgacaaagataaacaagaaggaacattaataacttttctttattggactgataaggatgttatttgcataatgtagggttaaaagataaatgaagcagaattactttaagggaagtataggcatagattgatgatgtgattaaagtagctttgtaagcgctgtacaagtttgtatggaaagaaaatctgaggctgtgaccacagtttagttagcacttgagggacctggactgaagacgcactatacatttttaagtgtcagtttcacagatttgaaatcgaccagccatggcaatcttgagagacattaggcagtgaggtcaagtatacttaaactgttcttkcgttgattttcaatttttcaaactgacaagggtgactgtttgtaaaagagtacactgtaagtatttgcatattagatttccttcagamcaaacttgatttatcaaaccattggacaattctatttttaaaaggattctatgcataattaagaattcattaacacaatcacatatgaaaagtgtcatttcaagaaaggtgaatatttcaaagatgacttcattttaaaactatccttccttagtttaccttttattttaaaasaacccttctttagtttcattgtgtatttgcaggcagtataagagtcaagtgtgtgtgtgctcttgtgctctaacttgtgatcctaggagcatcagacttaggtttacacttaaaatatctatgcagaaagcctttaatcatggtacctttttaattcccaaaagtttctaggaatctcgaaaataaactttacgttttatgtagtgtactcaacttagtggtcacgaaatatacaggatttgtattacatgcccagatatatgaagtgctaaatatagatataattatccagttttcccagagtattcaaaaaatgctttactttttcctattttcttaaagtgataatagttacatgtgatttaaaccaaatttagtctgaatctcttttggttttatggagttatttacctttttttgttgttatttcatctttctactgttcagtttctttgaaaatatcttttaggaaagctgcttacttgtgatggcaaagaggcagcttactgcctcaagcaaaaccagtgttttaaaacattcttttttatattatcagtgatttgccaagaaagagcaaagagaagagttattctctctgtgaactacaagattgagaattcctatntaacacatcaactgaagaaatctgataatgtggaagaagattgcttagaaggratttgtcagtaaatttcatttgaacaagcatcacttgtttaagcttctgtaatttcatggcacagtgacatttctaccaaaggataggtttgtttgggatacattttctatatgggtaatctcatttgcttctaattggtagctggtgacacttattaaaatgtcatgcttggcttacatctgtttccacaaagtgtccaaattctctcccttttttaaaaaaataaaaanggatttcaactctccacaattaagcccttaagaaagatagctaaaagaatatgtgacttgtgcttcctgattgttcattatatgaaattatagcctcagatgtaaaagttcagcattttctttgcgtcataagtcttaggaaggtcaaagagcaaatgcttatatgttacagcagtctgacttaatgtaacctaaataataatgccatcacaatggtgctagactggagaattaatgaattagaattcttacgaaacatagttcaaaagattacactgaagacctgtgtctcycatttcccccttaataaattacccatttgctttcaagaaatcaacagtttgcatttttttctcttaacagtttatttataaaatatttttaggacttagacattwtgtactttacgtwttacatccgtgtgtactgccacgctcctcgaagcaactcacagggaaaaaaatggactaaaacaatgcctgcagtgcctccctcctccctcacaaaatgattaattctgtatcttcctgttaattayttttagtttgatgctaatacatttaacaggaccatattaatactactcagttggcctatgacattttgaaaattaccaaaagggggaaaaaagagagagacagcaaaactgagctttttgatggctttttaacctctgctgtccttcaaatcaaatccctatgtgtcatagataagtaaactaaatgaaaaagatgacartttggagagctaagacagctcattctgtctgtaagctagtaggtcatgtataccagcaggcaagtagtattgagacaacttatgttcttccctcttcacctgcgacgagcaaaccttgctttcctttgtaaatggctgcttttacgtggcaggtccccactttggctcctccagcatttacaacaaaatgtaagagccaaagcagccatctgagtcaaggctttctcttagttctttgaattcattgaccagaaaggctaagtttgcttcttccttgacattcagataacaatgtcaggagcatagtgacctttgccacatggctatttactagatttaactctcgtaactctgccagttgcatgagattgattaaatttataaattctcaattgtctttttctttttctttttttattaacaacatcccttgagctatgtyctttaatgtagcagtagctaactaaattgagatttgggarttgtatttagaaaacagcatttctcagtactgytttggggtttggagaaattgtactttcaaatacataaagtgatcctctgtaatgattggatcacaagtaacaagrgacatctttttttttttaaaccgttagtagatggatttcatttattaactaaaagggttgtattagtaatgatttcataaatggttggawatcagttattgttaattctcatttaaccatgcgtgcatgtaatacatattaagatgatgctaaagaattgcaaaatctcgacccaggttcctttctttttaggctacagtgaaaagaacattcagttcttataggaagaactraatttatgcctcagttctgccacttattatctgtgagctctcggaggaaatgataaaacatttcagaatcttagtttcatcatctgtaaaatggagggaatgaataaccatacatgtaatgaatatccagtttgatcatacaaatttatcttattttgtattttaaatttacataattctcgaatgtagaagtcacgtaatgaacataccatattcaagaacactagttcctatgatagagttctgttgtcttcagctatttgttaaaagtgattgccacttgacttaaaaattaagatctgttggatacggatgttttgtgtacgtttttcctgttggcactctgtgtgtactgctataattagtgtagttgctagaactmtctttttctgcttagcacatttattaaagtctgtacatattagcatggcacggtatgttgtttatcttagaaagcatttaaagcaaaagctagaaataattttacctagaatgcacaaagagagcgtttctctytaaagtctaaattttattaatatattcctggggatatttgatttggagtttcagtttgggggaagaaatgtttagaaaagcagttaattaaaatactgaagcagaataagtgcctttttttttttttctttaatggtagtgcatcttaraaagctgcttagacttttgcccagtgcagctgtccttccctgaagtatcaggtttcaagagcaatgatggatggtgggtgcctgtagccagttgtggggtttgctctgaggtcaaatgtattgatggaggcaaggaatttactgccttctgtctccctaagattcaccagtacaattttacagggagaaattagactagacacatcaaatgctgatccagtgtctgcttataggtcaacaagacatatgttttcaatgtttaaaataaaaattttctccgtcttccttcctcctggcccatcccatctaaagggacattttgagtatgctctaatgatttcttactacacaagtagatcctggcctccctgtgaaaacacattccaactacttgtagtagtaacttaactgaaatattattagagaattttgagagaaaaaccaattcagacttctctggttgaaatagctcattatgattttgtagatacattgatttatgtcttattttaaaaagatctatcaagattatttggctagctagaaataagagtagtttgttggatgtatcttaaatattctaaatctacttactggccaggtaaccatttttgcttttctcggggagggggaagaaaagaggcaactatgtttttctagaggaataaaatattggaagcatcttccattggaaatatgccatggatggaagttgttctttgtcagttacttctttgacattcactttcttcatcaacatggaactctgtctccatttgatgtttggcatctatgtctccatctccattctaaactcttttattttcattttatctatatcccctttcaggtggctatctgtrctgtctcctgccatatgtctatccacttctcatagaaacaataatttctacatagataaccttcaaaataaatttcctcgcttgtctctggagttccagacgtgcatttctatctgcttgttacatgactgggaaatgggaggctctcctgtatcccaaacattgtattttgtaaacccaaaatactatcttccatccatatctatttctcttttcttcatacttcatctgagttatcccttgatyagaaaccttggtgtcatccctatctcttttcttccttttgttcttatcctcaggcaattttgtagattctcctcctgtaatcttttcactttatttcctttccatttctacctttcctatgtgttctgcactccataygcagcttcttaggtggtttttgtgttttctcatttctcctctttgagtcttcctaatttttgctttatgaaaggcaaacttgctcaagtctacttgatcaagtgctcaatactcaacacagccatcagagccctttgcagtctgctcccaaattgcatgtctagccttctccctcaccatagccctgtgatactctgcccttgtgcagtatcacattccctgcagtcattgaggaggctgtgcttttgggcacctctttagttctaccaatactgttcctggaatctcctttctcttaccagctgtcctcacttgtatccattgaaatcctattattctctcattttctaatgctcagttcaagtgctattccttttcrttgaattgagttsaactaaagaatkatggaccaggcgcggtggctcacgcctgtaatcccagcactttgggaggccgaggccggtggatcacgaggtcaggagatcgagaccatyctggctaacatggtgaaaccccgtctccactaaaaatacaaaaaatwagctgggcgtggtggtgggcgcctgtagtcccagctaaaaatacaaaaattatctggacatggtggcacttgcctatagtcccagctactcgggagactgaggcaggagaatggcatgaacccgagaggcggagcttgcagtgaactgagattrcaccaatgcactccagcctgggggacaaagcgagactccgtctcaaaaaaaaaaaaaaaaaaaaaatttttttttgagttgagtagaattgaaaccataaaatgtgaagaataattattcattagaaacctctcacaatgctcaggaccctgagataggtaaaaattaaaattcctttatggggaaaaatttcattaattttctcaaatttacagctatagcatagtggttgatatgtaatagttgtaatagtgattatttctaaaacttactgagcatttattatatgccaggcattctgctcagtacctcacctttagtattatgtttaatgtctaaaataacattctgtgtaagtcagatggttttattatcatcatttcacagaagagggttgatccatggagagattaagtaatttgcccaaggttgcatagataaaagtaataaagatggaacatagggtcaagattttaagtcaagcatcccaacttttatctgtttcactcactcttaacctcctcactcttgtatatgacatgattttaaaaaaaatatttatctcacatcgtccaggcaagtacgcccaatgacatggtgctttcttgactcaaattcaagaaaaatctatgttggaggccaagacaggaggattacttgagcccaggagtttaagaccagcctgggcaacatagcaagaccctgtctctaccaaaaaaaaaaaaaaaaaaatatttgccagatacggtggtgtgcacttgtggtctcagctacttgggaagctgagatgggaggatcacttaagtccaggagatcaaggctgcagtgagctgggatcgtgccactgcattctagtctgtataacagagcaagactctgtctcaaaaagcaaaaaactaaaaaaaaaaaaaaaaaaaaaaaraggaaaaatcttaagcattaataagtacgttgcctctctaccgtttctgaagagtatcttctgttcctttctctgcttgggactggaggcattgaaaaaaacatttttttaccaaaggggttttgaktcgatgaccttttttttctgcagatggcctccagctctaaaattttatcctattctgccagtgatacaactgccagagctctggggtcagtcctggagcagaagtgtttaaatgaaatatttccaccaagaatagttyttaaaatcaaaaaggctgccattttcatagctgcccaacaggtaagaaatcagaagcatttttataaagagaactatcgatccagcagggatatctgaagagcagtcaccsatcaaagaaatggaattatgccaagtgactgttatatatgcattctgcttattggcagcctgccctataccattttatctgagaaacttttgttaattataatgtcttctaaaatactcttgttttcatttcacccgttagtttcattatcaataagggtggatgatttgattattttttccatttaacctattttataatagtttagcctcttctccttgtctgtaagtcctcagagaactatttctgattatgattttataaataataaaatacaggatcttatatttgtttgatgatttggaaaattattttttctctgacaagaaggtaccccgaagttttaaatcagacatgatacataaaataaagttacatggaaaattactcggtcttttatggctttcatgatatctgaacaattaagtcttctttgcccaggtttctaaaatgcttctcacatgcatacactggcctatttagccatatgtttttctaccagttaatctataaacataacttcctagaagcatgaagcagggtgtacttttttaggtaatatgtagcaagggttttttttatagtkaggttatcaatacacattttaaaataatacttataaattaagaatgataagtttaataaatactgttatgtatattcagttactgatttaagaaaggactgcttatgtttattttaatcygacttttactatttaacagactcgacctgaatttgatttatatgtaccaaaaaaaaaatattttaggaaaatattaatttcaattttgaattttatcattcaaaatctgttttctctcagttacacttgtattatatcgaggataccaaaatagatactaacttcctttccaccaaattattcactgtcttttcatgttattaggtatcatctgttgaarggcccccatcttctcatgcttggggtgcagtctccttgtgtttggttttgacctcacygtagttgcttctgtgctctgcagccagcatgatctttaagaaactcaaatctgatcacgtcattccttgctttcaaatatttcagtggctccctgtttctgtctgtaaaaagcatgaaatattccttaccaaaaggcacctggcctttgatgtcctttcctctgctttgtctcttgccaccttgccatactcatattcattttctcttccccactccttccatccctaacacacacacacttgagccatactaaagtatttgctgtttcccagatgtaccacattgactctttctactgtaattttgagcatgctctctctcttccatttggaatgtccccaacccttccatttttgcctgatttttttcttccttcagggcatagcttagctgacaactcttcctagaaaatttccctcctcccaagtctgggtacctttctctgggyactaaaagaataccgaataaattctacatatagtgtctatcataatgcattgtaattgcttatttttactctgttttattaggagyacctggaagccaatgtccatgtcttattcccagtgacatctccagctcctactacatggcctggctcggtgcaatagtaatattgggatgttatcgttgagtattctgtaaacaaattagtgtgcccagaaaactcagaggtgaattagttcayggcccaaatcttacaacccatctgtttaggttctacagtttacgatgrtattgtctattgctcctctgtaattaattttaattttatattattttgagtgaagtttcatttaccyagttccttaccaaaccaggacaaagccaaatctcagtagagtgtgtgtatctactcatatgccactagacaagacaaatctgcctttacatctggctgyggtagcaattcccagatgcacttaattctgacacatggccattmttgaaccaaaakcaattgcctggcatgattatagttcttatttgttttcgttttaaggggcctcatccaggctgccaaatgtacaacaggtgccttrgttttatacttgccaatctgttgttattcaaatgaccgccctaacagagactaatggtatctaataaaattgatctcggttctggcaagccagactcacaagagcaagagccgtaggaactgcagtgggaaaatatgctggtggtaaatgtgcctggtgaagcacacactttttttgggggaaagtgacrtatgtctcacacatgggcctcttgtttatgttgagctgtggacattttctgaaacccagtgttacttagacactaggatttgcagtatctaatcttgtttttgatgtacttgctgggtggcaygggacaggattggctgtgccagcttatcagtgaatggctgtgccatgcctgtaaggcacagccaggctgtctttcatgccaaacagctggcatatttgatggcttgtatttcctattgttagaaatttgcctcactgatttcacagggccttgtaaagtcttgaatatygccagagctagccaggagaggagtatgtcaggttgcaaccaagagctaatatttaaatactgtattcaaatgrcatgtacgatttggcgactttttttctttataggacactgrctgaaggaaagctttgccatcaaaggagataacctcttgacaactggccttgcaaactttttcaaaagtataagtggtgttaactgttaggaccaggtctcagaggaacacagaattgtgtgtttttttttgtttttktttttttttcctgcaaggattttagagacctcattttattcactcactcacttgtgttcccatttatacatccattctttaaagcaccagacattaaactatgctaaatgcaaagtactgtgggaatataaggctgagtaaagcactattatacttgtcagtgcaagtataatttgcactgacaaattttagagatctggatttttaagattttagaaaacttgtgccggtaatgtccatttttaattggagagctttatgttgtcatgtggaaaaaagctactcaaattccaccatgatagtagagcttactggtttcattaaataataacaccaactaccaaagtaggagatgggggttagagccttagctgcctagccacacttcactttgctccacagttaattgagctcatgtaatttcctgtgacctagcatatagaatagctcttagcttgggatttggctattattggaccatctttttgtattatttatacccatcttccttgaaaaaggatttgtggcagctattaaatcatatgcttcattatccttaataaatcaccttggtagagcagacaatggattattgtacagatggttagtttctatgagaaattttttaaaatatgcataatcttggcctcattttgagtgatattttatttcaaggcttttaaaaatgatagaaacctttaaaaagtataccaaactgctcagtgactattgttcatattaaataaaaaatatgcttagtaaaaggaatgtaaatgtgattaacaattttttaaaatatattaagaggcctgttaccttttctgattgtgaaaatctttcaaaataatcttttcattatacagaaggaaagacacaccatggatgtggtagggctttacagtaataatgttctttgcaactagtgttgagagaaataatgatgtaagcaaatccatagataaaagattgtatccacaagcctatatgaacatggtattatgtataatgtagataaaggggaaataaatgaccttttagaygttttaagcataaaactcttcttttggaatatttaggtactagagtgacagattacattatgtttccatacgtctggatgagagagaaccaaacacatttctgcttgtaaaatgtgccatgctggcttcttcatcatgggtgatgaccatttttcagataccaattagaaattttcaaaaggtgctggaaaggacctgagagtaaacctcatgttgttttgctgaggaacctaagatcccaaaaattgaaraggctttcttactccagctgacctctccatcttggtctttggaacctaaggccagtcctttctgggcttgacactgtctttgttacactgcagaaatggggtccttgccaaccctttgcttgctctttgagggaggaagatcccatagtagacagtatctgccttgatgaggattctagtgacatttctcatcaaaactcaggagatgagaacgggaggcagatcttttttatcccagtattccaacttaagaaacccattgtcctttttacttaattaaaattaaatgtaattaaaaccacattcatgctagctacatttgaagtggttaataaccacatgtagctagtggccatgatatagaaccagcaccgacatasaacgtttcccgtgttgcactaagttgtattagacagccctagtctaccagatcattctgaaacatcatttgatcttttcaaggttacagatgtaataaaatcaaggtgtacagcatttatgtasttagaatactcgttgactctagcaggaaagatgtaagtgaaagatactgtgtttcaaaaataccttctcaaggaaagtgaattgataacagattctgtgcattttgcctaatgacagacaaactctttgattttgtaccagcccgatgtgaagtacacttccatggaaatcaaataaaggaacaaatatagtactatcagttccacctttcctctcagatttcccagggagtcttttctgttgctttccaagtgatttttgtcttcagccattgtgactgcatagctgtatgggaggaattaaggagtggcaatatagttggaagagggggctcagtagggtgattatgtaatttaacatctaaataggatgctgtgagagtgaatggggatgttcttaatgggtcaacaggtgtagactgggctgtccaaagcagatagatctgtcttaaagctccatgtgcagcgcagagcaagtgtgtctttgttaggatggccgacggagcaggagggagatgtgaagggtatcctggggatgtgaaacaccgtcaaagtctccccttggcatctttcctcctgctcttttgctttattatagtgcgtttgaattttgtcacagatcaggccaatccaatgtcacatgtaattaatgctgacaagcacatctcagaacaacctgctagaagtcactgaaagaaatctagggccagatgagtgacttccagactccacccctgacagtttggtgggaatgagagacagagtagtagagacagtactgagcctaacactttaaccccctacctctccacagtctccctaccactaggtgagagttaagtataaggtttctagagagatgtaatggaacagccatatcaaatacaaaccaaaggtagttctactaatgtactaatgtactgctctaatacagttgtaaagggatactgatgttacccttgtataccctaacttttattcatctatttcaaagccataaaagtaatataatctcattataagatatttagaaacagaaaaaaatatgttgctgataatccttttgctcataatccttttatctgaaaacatagtcgccctttctcctacctggtctctcatttggtcacagaacttgagaaaattgtttccaaatgcctttctctttttctttcacattataaatttctgtcacctcctacagggagcgtcacaggttctggtattttttattgcagttttttttgcattttgttttaggtaggtttttgttttttgttgttttttcattctcattgttatacaagaagttatttttgtttaaaaaaatacttcagaaagtatgcagcaatagttggattttttttttttgagactgtgtctcgctctattgcccaggctggagtgcagtggggccatctctgctcactgcaacctctgcttcctgggctcatctgattctcctgcctcagcctcccgagtagctgggattaccggtgtccgccaccacacctggctaatttttgtatttttagtagagatggggttcaccatgttggccaggctggtcttgaactcttgacctcaaatgatccacccgccttggcctcccaaagtgctgggattacaggagtgagccaccgtgccaggctgatgtcatttttttttttaagtcacttctgagactctaagtatgtacctccagttttataatcaaaataaacaaaaacaggtttctgaaaggtaggggtttttaaaggcagttgattaagaatacaatacatttgtgtattaagcagtgtttatagctttaacaaaagatctctgttggggtaggggattgtatttatacaatgctgagggcattttggcacataataatctcatgtttgctcagaatcatgaactgtgtccactcttcccccacacaacattttttaatwaaaaaaaataaagcttgtttctatttgtttataacatttattttcttaccagaggtgattgattgcaaggacagaagtgcctatgcttggtgacattttcagcaccttgtaacaaagtggaaaagtagagggtttactttgaacctgttaatccacaaaagcgtggaacattcacctcttgaagacactcatttttcaagtcttggttttttaattgtgcttatgtataccagctccattggtaatcagggtgaaaatcaagttccttcttgtaattacagatctaaatcttgatggtcacaggagtattatgatagggcaggagytgtaatgaaacagccacacattttaccccagaaagatttaatagtccatcttctcatcctcaccactctgtagccatggcttacagcactccaggtcataacacagaacttgaaattgtcattataggaaaagagactggggactctcagttaaggaaacccggtgattcacacatgacactgacctttgttgatagaagtcccttgtacatatcgttacatgcactgtagaagatgcagtaccagagccagtacagtattgtagttaattgayagaattggtgccaaaaccttgctaagtcccactgaaagggcgatcagtcattttcaatcatttaattatgtgtaaaaaaaaaattaagaatgggcatgatattttttcagagagatgtggtgtttgaaatttatgtaactgtaggcccaccgaattacatactragccccagtggtagttcacattctgattaaaaaccggaaaggcatagaaatataaatcatcccatttgaatatgttcaacaggtggtggagtaagaagagatagcttgcattaacawtggggtcatttgaaagaaaatattgtattagtccgctttcacactgctaataaagacataccccaaactgggtaatttatacaggaaaaaggtttaatagacttgcaattccatgtggttgggaaggcctcacaatcatggcagaaggcaaggaggagcaagctacttcttacatggatcgcagcaggcaaagagagtttgtgcaggggaactcttctttttaaaaccatcaaatcttgtgacatttatttgctatcacgagaacagcatgggaaaaacctgccctcatgattcgattacctcccaccaggtatctcctacaacacgtggaattcaagatgagatttgggtggggacatagccaaaccatatcaaatttaaaccaaaggtagttctactaatgtgtactgctctaatactgttgtaaagggatactgatgttaccgttctataccstaacttttattcatctatttcaaagccataaaagtaatataatctcattatagaatatttagaaacaggaaaaatatgttgcttatagtccttttgctcataatccttttatctgaaaacaacacactgttctaactygagtaatttttgtgatcctttrtactrtatggtgaatttgctattcagtacatcagttatcattttaccataaatgtattttttacaaccttgcctcatcataactgctgcttttaatggctgccgaatatttcatgaactagatgtgtctgtcttttgttgggcattgttcccttcttcccatttctcccactgttatcaatacaaagctttgaggaacagtttaatagaggtagctttttctatattttgcattatttctttttagggttgttatgtagaagtatgctgattatgctcataatgctaccagtaatgattgagaatactagtttcagccgggcgtggtggctcattcctgtaatcccagcactttgggaggccaaggtgggtggatcacttgaggtcaggaattcgagactagcctggccaacatgatgaaacctcgtctctactaaaaatacaaaaattagccagggatggtggtgcccgcctgtagtcccagctgttcgggtggctgaggcaggagaattgcttgaacctggaggcagaggctgcagtgagccaagatcgcgccacagcgctccagcctgggtgacagagcgagactccatctcaaataaataaataaataaatamataaataaataaataaaatccccttggtcawtctgaaaattatcatctaggttttgttcatttartaggcaaaacactttctcattattggtttaatatgaatttctttaattactgaagtgataatttttcccttatgtttgcttgaagtaattatttctgttatatgaattaaatctctatatttcctttgcctaagggtttttattcattagttcatgttctttatatattaggcatattgactstagtcatattgataacaaatgtaacaaactttgcagttcgttacaaggtgctgaaaatgtcttggtacatttatgagtcttactttaatgattttttaacatacaggatctttattcatcattttatatagtcaaatctgttgatggttttttttctctcttattattcattttatgtttagaattagaaggttattttctttcctrtgatttcaatctgattttgtttttggtgttttgtttctctcattactgttttatatccattcttcagwcacatgatcctcaaacttatttaggtgaagtatctgaaagtattcactgaccatgaaatatcattatatttatttttatcctgcaaactacctactcttttgccagaagaaagtccaactaaaccatataataaattcacaaccaagagttatatacacatagaatgtaaaaaaaaaatctgtcaaactaaataacctgttatttaatcaataagttgttttctctcttttatttttcagtttcaagcagtttattagaaaataktacaaagttcagtgaaatacctccaataagttaattttgagttgaatttaaaaagtatgttagttgattttagaattgaaacacttccaagcagrtgaatgatttgaagaagaggaatgtattgtgaattttttccctttaaatcatctagtgatatatggttgtggtataaggcaaggttctaaataatttttttttccaaatttgtcasttccttatccccaaacgatgcaccgaactgtccttccttcccccaagtatttgcagtactcttttttttttaatttgaagtcgttatgtgttttaagatctgtttctggtttctgttcatgggtatctggtttgcttgctcttcttaatttttttatacatctgtgattaagtcagtcatcataacctttcaattattggagttttattatgctggacccctctcccttaagattttcttagagatttttctttggtgctttcttgtgtttattcattgacatgaacttcagttgactcttacattttcaataagaaaccaagaagccttaattcatattttcacaaaacatggggcttactcatgttctaagaagtgggcatattacatataatttaattgtagtcaacttttattatactgggaaatctcttcttttctcttataaaacaggcaaacaaaggaaaccactttgttttaaatggcacagtttcattttgttttaaagggaatatcaggctggcwgcggtggctcacacttgtaatcccaacactttgggaggctgagacaggagaatcacttgagtctagaagtttgagaccagcctgggcaacatagcaagatctcacctttacaaaaaataaaaataaaagtttagcgaggcatggtggtatgcacctgtaataccagctacttgagaggctaaggtggaagaatcacttgagcttgggcagttgaggctcaccacgattgtgctactgtactccagtctgggcaacagagtgagacctcttytcaaaacaaaacaaaacaaaacaaaaaaaggaagagaaaaggagattagtcttctgatgtgagaatgcctattttgactttaattaaaatttagtttttgtaattccaaaatcttgtctcaatttattttctagctggaggaaaaacaatctttatatgcctcatgtttcctgtatctttgctatctcttgtttttaaaataagttcttgtcaggcgcagtggctcacgcctgtaatcccagcacttcgggaggccaaggcgggcagatcacttgaggccaggagtttgagaccagcctaggcaacataatgaaactctgtctctactgaaaatacaaaaattagctggtcatggtgtaatcccagctactarggaggctaaggcaggagaatcacttgaacctggaaggcggaggttggagtgagcggagatcgtaccactgcactccagcctgggtgacacagcgagactccatctcaaaaaaaaaaaaaaaaaagctgggtgcggtggctcacrcctgtaatctagactcttccccaaatggtggggggatgggtgggttattaatggtaggtattggggggttagcttgagatgggacttggtcttagaagagagctagttctaaaggttgtttacttttctagggaggagtctgctactagtctaatcagctgttgggtggatcacgaggtcaggagatcaagaccatcctggccaacatggtgaaaccccatctctaataaaaatacaaaaaattagctggacatggtggcatgcgcttgtagtcccagctactcaggaggctgaggcaggagaatcgcttgaacctgggaggcagaggctgcagtgagccgagatcgtgccactgcattccagcctggcaacagagcgagactccgtcttaaaaaaaaaaaaaaaaaaaaaaaaaaaaggtttttattaatactctgaacttaagacctaaaattactttaaaaaatgtgtatcaaaggtcagagttttaaaattaaccccactattttttgttaggatggattttgttggtatacttagaatataatcagttgtcgagtagatgtcctaatgttaaaaacttttttatttttaggcaggagaaaacaatccaagaagagtattgtttttcagtgattaaccagtatctctggtattttagagatgtgccaagggctctctttctttgtgaaatagagcatatcttgtagtttgctttgtcartgttctcttagactatcaaaacactcaaattttacattttgagcagtatttacgcctgaattaattcacaagtttcaaggtcactaactttggttatattatattrttattttccaatttagccacctctttatttgtataatagagcatacagcagcacataaaacgcaaaactctaggacataaaaagtggcattcggacgatgttgctctgaaatttatgcattaattaaaccggtatatatgtatgcattaattaaaccaatatttatgaagttcctactgtgttacagacgtggatccaggcactgaggatgcagcaggccatccaaatataaagttacttccttaggaagcttccattctaatgggagagtgttgttaaagagatatataataatatgtaaaatgaatccataatggtgagtattatgaagaataaaattgccaggtgaagtggctcatgcctatggtcccagcactttgggagtctgaggagggaggatcacttgagcccaggagttcaagaccagcctgggcagcatagagagaccctcgtctctacaaaaaataaaagtaaaaataaattagctggatktgtgacacacacctgtggttccagctactcaggaggctgaggtgggaggatcacttgagcctgggaggttgaggctgcagtgaaccatgattgtgccactgcactycagcttgagtgacagagtgagacctgtctcaacagcaacaacaacaaaacaaaagtaaaacttgtcagggcaaagggctgtaaggaaatcagtctatcagtgtatgcggtgaggttgaatcactgttgctttaattaatgtggtcaagggagactctaagaagccgactctctgggcaagaagagtttagyagagaccttggtgcttggtgcttgggtgcgttattcaactcttttgaaaagcaaattttctcctcagctgtgtttgtagagactaccattctagacatatcccattctctgtgcccacgcacctgaaatgcagagccagatccatctgtgatctttggtctcatcttgactatagctggtacccataaactcaggtgatgtctagctatgccaggagctggggtcatttcgtttcttcgtccaccccatgctttgctttgctgactctctgattctgatgcatggggcccagttgaatccatgccactgtctttactgattactgactttawcctggggtccttgcctgacccagatggtgggtactcttttcatgcagttagattcctcagttcagtcatgccaacctctttaggcaaaagcaccagccatgctgtgagttattatttgctctgaataaccccaggagttactcactaagctgcctgcgtaaagctctttttcacttgcttttctgctctgactgtatataggaaaagtctgggaaatggcaagtttatatattttgcccagagccacagagggagaacccattggggtgtttgttacaaatcattgtctttacatgttccagctcattgttttggtctgtgggtcaaacagttttttaaattcctgatgtgtggtctccttgatcctcactttctttgtctctgaaataggaacaatatgagtacctacctacctcatactattgctgtgaacattaaatgagataatgcttttaaagactagtatgcctgacacatgggatagtcaaaaaatcaatttttattagtattaatgctgtcagtattaatacctttgccgtaattcctccctttatagaacagttttgggaattaaatgtgtgaacaagtagttgttaataacattttttatgaartaaacaaaaavaggttataaaagagactatttttgtataggtgctgaatttttaaaacattttatctataaaaaagaaacactatcatgtgaatcatcagatttttacacttcatatgatatatgaaaattttcaaaataaaaccagtttttaatacctaggttttaaaaatctatctaaaaataaatctacgtaagaaagcttccttgtctgttataattatttaatatcatggaaaaaaacaggctttttcccttgaactattgaattcaactactgtgaatcattctagtgtaatagtaaataaatgaaagtaggtgactatgaagggaagaaattcattatatttctaccaggattccttctggaaatgagagtgaaaaagactaggcattattgtgctttctgaacggtttgtgtaattatgtgagaaattataaaaatttagaattctactaaatgtctacctgttaggtgaatttttaaaaatctgaagtaacttcttaaaatgcccggtgtttttaatacatttatccataagttggttaatttttgtaaatggtacagtatatagctgtcatttttctttaaagagaggtggaaaccaagcaaccagtctggaaatacagttgtttttcaaagcctaaattttaacagttattaaatcatacatatatataatatatatagaatcgtgtgtgtgtgtgtgtgtgtgtgtgtgtgtgtatatatatatatatatagagagagagagaggagagagttttcattcaactttataatgttgtgaatggtgcctgttattaagattgcatcattcactgagtagagttttaatttttttcaatatgaaaaatggaccaggtcatacatagatccagccctaacaagtgagaaaaaaaaatgaaaaaaagaaaattggaaattatgttacagcctgaatatttgctttgaaatctagaggctaattagaatatatatgtaacatctactaaagcgatgaataaacttagataattaaatgttaccatttaaaatacatatctctacttactggactctattctttctcatttctctgcctgttactttttatatatcaggcttatcaaaagtagctgtgctcaaacatcctgaagatgtttcaaaagtcacatgctcaaatcaatgctaataacctcttgggaactaaggggtagtagaatactgtccaatatggttatttcattagcaaggtcttcctatacaatgagtcagaagagaaaagctgtaaacttcccagctcaacctctaaagctcatgttttttctttctctctgtaagcactgttgctgtggcctgtgtatgaactggatgtgccaatgctgttattaagatttctgggtcgcacacagaagatatcaagtcagttgtattgctgatttttttttcatctgcaaagtaagaataggaaagaaaatgtctttcatgttacagctttctaggtaatgaagagtagatattaaatttatgagacaactaacatgaagtgaaaggttgcatttgttttcatttcagatattattttttgttctttgggggtatgcgtttatgaaaaaatgaagcctcatgcaatctgaaaaagagaaatacagagagagcaagagccagagagagagagagagagaactccaatttagagaaatattgaatatccagcctccttcagaaatgattagttttacagttgaaagatttcacatttaaaataatcctctttgtgaagtcttgtgatcctgcagtgtgaccacaaacttaatcaaaatcactttgttaacaaaacacacatagtgggtgcaaacactggttaattttctctttctcataacttgaagtatattgtgacctcgttcagttgggcatgtctgaaatgttgtgtggctgttttggtaattgccataattgactttttctcttacttgtaattcattgcctattttccccataattttcacattgtgaagtgttatttgacaaaaaaaaaaaaaaaaaaagatgrttttagctgccmcttgctttacatttgacatctttttgtttttctgctttcatgattacaaaaatacactgttacccactgtcagtcttcactgttttcttcattgtttttctcaaagcagttatctgttaggataaattaaaggttgagaccaggagctttggggattactggatcaatgcacaccatttggcataacgtttttattgcaggattcttaaatatatttaggtactgtcttggtagtcatcagacatatgtatagatcatmcacacacacacacacacacacacacacacatatacacatacatatttaaatcaccggctactgtttgcattcagtgcacattatagctctcagaaggttgcaaacacttytcattgttgccttttatctgtcatgctgttcaaataattttcctggacactactaaagtaggaaatggatacaagtaaattacaacttgtacccatttccaactgtcaaaaaaagcactaaaggagaaatagaatatggacttcataaaacgttgtgatttggaagcagtttttgtcaaattagtatatgtaaatcgtctttgttttgtgaaactttctctgaggttttgcagtgtttacaatgtagttgactcacaaaagtgatacagtgttgaaaccaatagcagagaattttcagaatgataaaattcattctaactgtggctgaaagagacagattgtatgtgagttcttttttaatatttgaagatgatatgtttcattcaggacattacattttaaaggrtttattatacatttgtaggaaagtttaacaagctttaatattgctcacccagttgtttctctttctatttgaaatgactggttttattgaattggattgggatttgctttttaattgtatgtagactgtataatgtgtagtctggtctctgagcatgttatataatgtatttaattgtatgtagactgtataatgtgtagtccggtctcctaatgcagtttcataatggtgtaatggaagcaagccaagtgtattttgatacagagtaagcgagattgttttaaatttttaaccaactcacctttaaacatttcttgacattctcctaggattcaagaggtagacctaacaaagataatcatcagaaaagagaatgtctgaaacaagtgcaggaatgaattcatgacagttttggaggggagtctttaataaaaaccattccgcaaccctccctctyactgtcaagtatcagaaaaacaaaacccttttcctgagtctcagtcatcttgtctgcgaagtgtaggagctggattcagtgatgccaaatgtcccttctaagtccacagattttctaagtgcctatcttaggtgaagctggatcatcaaaattcctcagaaaaactagtccttgagtattctaaagcatatttgttattaaaaatataaacttcatactaaatgctgatatatcacttgctgattaagccttataatggtttcactaataattaatcaattgaagagaattgttagaaaaatgargcaacagtttacacyctagtagggttttgggatttctttaagcaatgatttcaccatcacrtatgccctttccccaaattacggatttgattgtgaatatccttgcgtgcgaatgaccatttgcacttgttttctctttttaaaaagtcttcctttcagcgaagtagtgtctgcttcccctttgctgggtattgactgggaggaacatgccccctcatgatagggtggacactgtgtcgctgcacactcctcactggggggagttgaaggagttttgagatgatcatggtcctcacttttctgtttggtcacagagcacttaattgtgcttgaaacctctcatctgtcsatgattcgatgactgaagcccattctccactttcctttcttgtttaccctcttgtttcttaatatcaagattttttgtttcttgtggacttttgagagtgcccagaagtcttacaatttctataaaatttatctcatatcttttaatcctttgattattttccctcaagtgctagagttcaaaataatctttgcaaatttatactaagcaagctgtagaaaaggggtaaaacaaaacacttaagagtttggactgtggaacccaagtgcttgagttaatacctcaggctctccccttgtaagctgtgagaccttgagcaggtcattttatgtgctttgcctcattttctcatctgtaaaatgaacataataacagtacctatgctatagtgatgcttaaaacattaaaagagttaataaatgtwaggagactagaacaatgcctgattccaacacagtaaagactcagattcaaactttggtatttaatcttcaaattttgtttactggtattacycagtaaatattttctgaaaggtctgttgtctcagctacattataataatgttttatagaattatatagttaatgaagaggtttcatacaagtaatagcatttaatcttcatactagttttctgatatgttattgttatttccattttacagattataaaagtgaaggtcaggaagggtaaatgacctgctgaagattatggttattagtggtagactgagctgtttgtccccagtcagctgattctatggttgtttcattgttctgtgctgtcaaaatatatctctagaggatgatgcattaatgtgtactatcttcctagtaaccgagctcccaggaggtagttgatgctctgtcaagtgctggacaacaacctgtgtgcaagtcagggggaaaagtccagttcaccaagaaattctaacccagtgtgatgtgtgttatgataaagatttccataggattataataaccttccaaaaaagtcacgttttaaatgcacaatgcagagctactcaccaatacaaaagtaatgaactgatgtatgcacaaaatgataaatctcgagaacagtatattgtgtgaaagaagccagaaacaaaagggtacaaactgtatgattccctctgtgattttttaggtaaaactaatctatagtgacaaaaatcatgacagtgattgccttggcataggatggaagggagctgggagtgagggaagaggaggatgactggataaggacatgaacaagctttctggggtgatggaaatgttgtatatcttgataaggatgtgggttatgtagacataacatttgttaaatgtcatccagctgcacctaaaaccygggcaattcacttatataagytatacttcaattataaaaataaaataatttacatggacaattaaggaaacattagtagtgattatctatttaatttggaaagctstcaacagtaaatttaaaatggatgcatatgatagatggcattgctggcacagtgtgatagagtatttccaagaatatgtgtttctttttcaagtactgcattttatggaacactgttgtccacatatgctgtgaagatgaacgcaccctaagttattttaaaataataacaaatctgccatggcttgaattgtctgagtttacatggagaggagaatttcacaaattttatagggagtatttaatgttattctgttgcaaagttaaagctttataatgaatccagaaaaaacatggacttaacaatttattatatatgttttttagagatgcgtagataatagtactctcagttaccttctcactttttgataactagttcttcaactgctacagaacctggtatcaattcagcagcaactcataatttggggttctgcctgccttagagtactactaacaagcataacatcttagtctctttgagctactgcaacaaaatatcctagatagggtggcttaaacaacaaacattatttctcacagttctggaggccagaagtccaagatcaaggtgtcaggtgatttggttcctgtttggggtctttttcctggttcacagacaggtgccttcttgctttgtcctcacatggcagtgagaagtcatttctgtgatgtttcttcttataagagcactattcctgttcacaagggatccaccctcatgacctaattacctctcaaagsctcaccttctaataccatcacattgagtattagagcttcagcatatgaatttagggagatacaaacatttagtccattgtgcatagtcatgtttaaacacaagtctttgagtatcaccagtttcaaattagccattggaagacagaaatgattctctttccatcaagctctgtgtacttcataatcattgcatccagctcttcatctgtggattgtataacctgtagacttttatgggatttacttcctttttaaaataatatacatataagccaaacagattaaacagtgcccaacacagtattgaatatattattatcttattgtttaggggatggtgataagtactaattaaatgtgctttgagatattatattaatataaaaatgtagatatttcagagaagatactcatccacatgatttcaggcctgttcttttcaataggtcctattcaagttcatttagctatgtcttaattggattacatccatatttagtttaattcataaattttaataatcactagtaaacaataataaatctttgagtgatgagacatgataaataccctataggttaaaggcatgctctgctttgaaatataaatgatgagctgattactttatgaggggaaaaaaaggaatttggttactttctgtggcaaaaacctaattttttttgtttgtttgagacagagtctcactctattgcccaggctggagtgtggtggcccaatcttggctcactgcagcctctgcctcctgggttcaagtgattcttgtgcctcagcctcctgagtagctgaaattacaggggtgcgccaccatacctggctaatttttgtatttttagtagagatggggtttcaccatgttgcccaggctggttttgaacccttgacctcaggtgatccacccaccttggcctcccaaagtgctgggattacaggcatgagccacctcacctggtctaaaactaaaattttttcaataacaaatagattgatgggttgagtcacgtatctatttaccatagatttccctaggtttgggggactgaaatatgaattagaagttgtccttaccctcagtgagcttagttagtctattaaaggagattgataggaggacagattttttagcaatttagtatgataatattttatcagaagtgtagtgagcctagagaagaggaattaatcaagtctactctgaaccatgagggtgtgtgtagtrtgtgtgtgtgttatatgtgtgtgtgtaggggtagaaagacactagagtttgactgaaagagtgagaagaaatctgccagtttaaacaaggggagaaagagcatcccaggcagaaggagaaacatgtgtcaaggaatcgtgctcattgggtatcccataagcttttttaaagatatgatgagaaccagtgtgtggggttagagagttgggagaagttgtcagagaccagaccacgcaaggctctaaattttaatatttgtagaatttcttctrtttgycaggcatcatgctaarcactgggcatttactggtgatcagaagagatactatgcttgccattaaggggcttaccgtccagcaggagagtaaaataatggatgaatacacaattgcaaattggataagcrctatatagaaaaaaaaaaaaagatggtgcctgcagtcttggaatcttggtcttgtacatttaagtraagacctgaaggatgagaaggaatcagttggatatgggtagctggtatcagcacgtatgaaggataaaaggcaggaaataactgtgtggtgaacggaagggaggccagcagggctggagggtggtggactgggtgagtcaaaagtgattaagattggagaaaaatggtcaggaggtctgatggctcagggctttggtaatgagattggatttcatttaaggcacaataggagaccatgggagggattgtaggctgaggggtgaaacaatggatttaaaaaatatataaattattctggatgctttgtaargaatagattgggaggtaacaagagtagaaataggaaggccatttaggaagctattataggtagtctggatgagagatggtggtggcaatgactacaggatttccaactgattgagttaagggtgtggaggaggaggaagattgggaagaaattgaggacagatacaggcytttatctgtgaattgtcagaggcctgtgaaccagagcaactccatcttaaaagctgggtaaaatgaggctaagatctactgtgctgccttcccagacaaggcattctaagtcacaggataagataaaaggtcagtrcaaaatacaggccataaaatccttgttgataaaacaggttacagtaggagctggccaaaacccaccaacaccaaaatggcaacaattgtggcatctgctcatccttgctgctacactctcactggcgccatgacagtttgcaaatgccatgggaatgtcggaagttactctatatggtctagaaaggggaggcatgaataatccaccccttgtttagcatttcttcaagaaataaccataacaatgggcaaccagcagccctcatggctgctctgtctataaagtagccattcttttatttctttactttcttaataaacttactttcactttacactgcgaactcaccatgaattctttcttgccaaaatccaagaaccctctcttttaaactttgcttaaaacgttgctaatcttttatttttcaaagtcaaggaaccttttcttttaagctattacagcttttaacagttaagtgtactcctataaaaaaatttagagcatatttatttctctctacctcattttttcagaattttaaaaactagttgtaagcattcttatgacaatatagttatttacatgagtgcaataaayatctgttttcttttgtcacaggacacaattttaaaaattggttattttaccaaggctttaactaaaatggtgtactttcctttaagttatcaaacttaacttgtaaagccaataaaaaccctttagaaaactggccacataccttgcctaaaacagtccctatacagggtttctaacctgtgccaaataaaaaatatcactttctaacaggtccagaaaccacaagttatcttgggacctcaaaaagaaaraaatttacccaactcataaatatttaaaggtacaaactcatggcagggctcagctttaaaaaagtcttatctaaaattccttctatgaaacaaagttccatcaaagccaatttttaaaaagcctatgtaaaaaataattattcttactgcactttatacaaataatcaggccaagtataataaagcaaatcagtcttaccataatttatctttagtgaaaatggaaaactgggaaaaatactacgtttcaagaactatactatacttgttattaaattctagtctcattagttgtttctaagcttatttctgcaatttcagcaaaccctgcttattcctgtgaaccaaccagtgatctctaactgctgctcaaaaaaaaccaaaaggaataagtaatgtaaaaatctggatcagtattctaattctgggcacattacaatcagctgacaacccggtatcagcttagttccaacagttgcccagttcataaaaagccttctaatttagtttacttaaaataacttattttgctttactcttgtgaaatatattactgttatactctttgtataagaatacaaaacaagcttactgaatgttttattaaacagttaactaatcttacagataccaccttttgtcaaaactcaaaagttataaataaaccttaccatactaacactttctaacraagctcttctctaccstgaatgcaagagacccccatagttaggccaaaatatcatcgcccctatttggcctaaaaaagttacaaaaaatagatctttgtccctgggcaacccttaggatcaaaggttctcttataaaagggagaggggaaatgtcaaargtgtgctaaccacagcaactccatcttaaataaaagctgggtaaaatgaggctargacccactgggctgcattcccagacgattaaggcattctaagtcacaggataagataaaaggtcagcacaaaatacaggccatgaaaaccttgctaataaaaggtaayagtaaaggagccagccaaaacccaccaacaccaaagtggcgacaagagtgacctctggttgtcttcactgctrcactcccaccagcaccatgacagtttacaaatgccatggcaacatcaggaagttaccctatacaatctaaaaagggaagacatgaataatccaccccttgtttagcatatcatcaagaaataaccataaaaatgggcaaccagcagcccttgggactactctgtctataaagtagccattcttttattcttttacttttttaatgaacttgctttcactttgcactgcaaactcaccgttaatcttttctcgcgcaaaatccaataaccctcccttagggtctggatcaagactcctttcctgtaacaaaatggtttccttccttccgcctttcctttcctttccctttcctttccctttccttttccctttcccttcccttttttgaaacagggtctcactctgtttccccaggctggagtgcagtggtgtgatcacagctcactgcagtctcgacctccctggcccaggtgatcttcccgccttagcctctcgagctgctgggacttacaggcacgcgccaccaccacacccagctaaggtgtgatttcttgagatggggaaggctggcatataaacttgctggcggataaggaaatcagcttggaaactattggtttaaggtttccatgaagcatgcaaggtggggaagggctatgtattacatgattctgtagttcaaaggtacaattgctgttgagttaaaagtttgtgaatcattgaaaccaaagatggcaattaaagctttgtgggaagggatgaaatcatccaggaattttaagaaggggttcagtggaacactgaacatttagaggtcaggcaaagggggtgaaacttctaaggagcytgagaaagaacaggcccaagtggtaagaagaaaactaggatattaaagtagagtagaataccgggagagaagagggcttcaagaagaggctgtggggtgtgggctgttgagtaaaatggaaacagaaccctgagtattaaatgtcttactagatcctctgtactttcttcagctgtagatgggaaagcattggaagatttcataccgaggactgacttgaccagaaatgttattttcgaaagattccagtgtgggctgtgtgaacactgggcttagtttggaggaatggaaatctgttaatcctttctgctttctaacctgttaaattgccgtagcttaagtaaatgactgcagcactggtggttttgggggatgggagggggttgaagtttaacagaattggattccagttctgttccattgtcagctgcgggaccttgggcaaattgcttaatctctgttagctttggtttcctatgtctaatttgggtataaaaataatagccccaaccgaaggctgtgaggtataatgcataacacaaataagtcctcaataatattgttattgatactgtacttgtaagcatgtgtttgacttccataattactttatctcagtgaatcatcccttctcctgtggtagcgttttaacattagccttcaacaaccatgtccttaactttccaaccaaggtataaatgtaacagttctactctctctgggagaatttccaaattgtagtgagcgcctggctgtgcacaatttaaagtatactttctctgtcagaacacatgattatattggtttgtactttaacattttatttccagttcttatagccttttatttctctatctgagtttgctttgatagcagttagggtactagagccctttctaaggcagacattacctgggcatggatgaatgttccaggggcaaaaatcaaagagaccagatatactaaatcactgggggaaactttcagtgactcaacttggtacagagtaagaaacataagaagggtgtagccccttgtgcatttatgaaataatggagactgaaaaatgcttactaagcaaaacaaaaccaaaaccaaaaccactaaaaatgtgttttctgytttcacagtgactttcatgtttgccaaagtggtggcaacaaatcctgtaactgtctatgatcacagaawatttaaagacttttgccttgttaaagagttagttttcaggccagatgggtggctcacgcctgtaatcccagtgctttgagagaccgaggtgggtggatcacgaggtcaggagttcgrtaccagcctggccaagatggtgaaaccccgtctctactaaaaatacaaaaattagtggggcatggtggcagttgcctgtaatcccagctactcgggaggctgaggcagagaattgcttgaacctgggaggcggaggttgccgtgagccgagattgtgccactgcaatccagcctgggcaacagagygagactctgtttcctgaagttgaaggaacttattggatggatgttgttatttctacttagaaagtctaaaacagtcaagagccaggccagttagttgtttctcacaaagtggaggaaagaagaggtgactgcattgggattggcctccactcttaggggaaagggggatttctaaatgtttcttgcagacaagagtggatgccctcttgggccttatccaaggagctgctaagagaaagaaacaaaccgcagtagaagttaccttgaattcctaggggttgtagaaggagtgagtgatgcgtggggtagactatggcacccacattcagcacagcaggtaacaggagtccaggagtgagtgccttctgaagaagccatgagcttaccatgtgagagagagagagagacagagagagagagaggtggctgtaaacatgggccaaacccagagagcatgtatgtggccagctaccaactgtgatcatctaagaattttcttattcccattgtttcctttttctcactacttaaaccccatagttcaagaaaatacctatcaagaggagcagagggatcagaggaggtgaaaaaggagaagaaggggctgatcataccttttttcacttattttctgatgctggtctatagccaaccctagctgggaaagggaggtggctataagttgaaagtttcaagtgcgactaatatgctgaactgggcactctaatttctgaattgggactgtgtttgataacttaaaatgattgtatgacatcatattattaagagttagaaaartaagtagactccttgacttgtcgtgtagggagtagaaaagaactttcaccattaagcaattgtaaagggatagtggaacataatatagaggtattctgtgactctactctttgagtcttgtgtgagtccagagacatatatacatacacaaaaagtgtgtgtgtgtgtgtggtgtgtagtatgtatatattttaatttcaaggaggcgttcgctgagaaattgatttctttaaatacaaaatattaccatgccagaaaaaggcataaaatgctagaaaatgatggtttaacaagagttgaactttcaaaactaaaaacataaaaaygtatccttaaccttgataggattaaaggaaatcactgtctttgatggtaaatgaaacaccaaacacttactttcttaatattttttctgacattttataattaactaatgaatatgatcaggctttattaaaattataaatatattctgtatatttaaatatactctcttcaataaaaagctgttatgagagcagagactctcttcctcatattaaatttaggttgaaaagatggcttatggagctagattgcctagtacagtaagtagctctgccacttaactagctgagtgacctttcattaaattacttaatctatgtgtgcctcagttttcacatctgtgcagtagacatcagaattgcacctgtattatttgtggttatattaaagctacagatatgcatatattttaagaatataaacatatatgtatatatagaaagtgttagcaaatagtttcctatgttattgttacatattctgatttatatctttttctctgctcttacaaacagagaatgaaatttcagaatgtctgaaatgttgcctcaaaagtgatgccgtctgctgtgaatggctactttaagaatsttgaaacaagggcactcaactcaattgtcaggggatgtcatacttttataatactyagcttcctgagcatatgattgtgtggacaaggagaacaagacacaggagagccccagtgtgatctttcagctcgttttgtgctctctgattgtatgtcagttgaaggaattatctggttaattccggctatcaacaacttcacgatgctgtgtcacaaaggaatctgactttaactaacaatctcccacattttattgaaagtgcctaaaatgtaatgtagaaagttaataattgccccaagtttcacaaagagctttttttttgatccagagtcttgctctgttgcccaggctggagtgcagtggctcaatcttggctcactgcaacctctgcctccaaggttcaagtgattctcttgcctcagcctctcaagtagctgggactacaggcaygtgccacctcgcctggttaatttttgtatttttattagagacgggtttcgccatgttggccaggctgatcttgaatcstgacctcaggtgatctgcctgcttcagcctcccaaagtgctgggattacaggtgtgagccactgygctgggccccaaagagcttttatattagagaaatataataaaataaaatataagttaatatatgaatatgaaacakatcagtctacctcacatatgttgtattagaatgagcttttatatagtttatatgttttatttattcaagcatgtcaagtaagtcacaaactttgataatagtaattgtttccacttaataatggaatactcaagacacagagtaagtgcttggtgtttaatttatcaccaaagatagtgatttcctttgatcctaacaacgttaaggatacatttttatgtttttaattttgaaagttgatctcttgttaaaccatcattttctagcattttatgcctttttctgacatggcaatattttgtatttaacccagtagtcgaacattgcaactagtagtggactagagtgctatgtcgttttcctggttagttaccagattctctattcttccaaatgttaccggggaactcttcgggagtaattgtttaaatctgttgtacgaacaaacagctatgtgttcagaatggctgaatttatgttgatatcaaaaatggccaaatgatttgaaattcaaaatcgtgattaccaaagccaaattatttgaaattttataaatgcaataaatattaattagtaacaattaaatatgtgcgtaagaagcagtgctcttgtaagaagcacatctaagtatttggtctgttcttaggcaaatgaatataatactaattcagtaggtatgattttgcattctggagacttaactttttgactatgtggcttttgccagattgcttaacctttctgagtctcagtgttttaatctgtaaaatgagaataacctcaccttaattactgtgagaattgaagacatttgtatatgatcatgacattagcaatgaggaagaaagctcttaggacactacctggcctgtaagtgtttactaaatgattaatcttactattattattgttaaaggcagtattataaataagttattaaaccaaattaaccctattttcttcttttatctctctgcctatccgctaaaactgtagagagaatcaaataaggtgaggcagagaatatagattgtaaattttccagtggccacacaaatgtaaaatgctatcatttaattaggatgaggtatacaattttatgtttaaagtcaattaaagtgatattttccaaagctttaaacctttggcttctgatgtatcaaacacctagaaattaaaatggataatcttgatttatacagtgtttcagatgctcttaattgtagttcaattgaaattcaagagttacaatttaactctatctaaaatgccctgaaaatattcccactaagccgtgagttataacaggcaatttggaagctcaggttgtaaaatttatgtttaatggtattgatgatgctttgccttttaaaaacccctgagcaactaactgtagttttatttgatccaaatttatcttggttattatttccaacccrgtcttagttgtcaaatgttttggagcaaaatctggtcatcaggaatcttgaaattctaccaagaagtccaagaagaagaaacctacttgaaatttaagatggttgttaggacagaggctagacacactaccaactcccataatcagtatgcttattaggtattttatggattttaccattctatgaaattgatagaaggtatattttattttgttttgttttgttttattttattttactttagagacaggggcttgctgtgtcacccagggtggaggacagtggtgtgatcacagctcactgcattcttgaactcctgagctcaagcaatctttgtacctcagcctcccaaggagctggctggcactacaggtgcacactactatacccagctaattaaaaaaagaaaaacaatttgttttgtaatgacagggtgtcactatgttgtccaggctgggtgtgttttctctacatctaaattataaaacttttactcttgagaacatagaacttcttttactatttctaaataaaattaaagataggaatatgaaagatttattcaacatgatatggtgtccatttcttataaaatccattggctctggagctgagtgtcagattactaargttcattaaagctcttgctcatagctgttgttttgcttttaagaagtgaatttaactagcatgagaaatgtcatagaaatggagttgccctagtgtgaaactatgtcagtaacataaaatggccttcaaatttaaggccgtaattgatattacagcttcatcatgctataccgaaggaaaaatrttctttaatcaaaggggttcatattgttgattcacttattctacttgccttaaaaatgctgagtggtaaatgctaggatttcttccgtgtaagttacacttataacacagatgtatctgaagcacaggtttgcaaagaaatgacaataaaagattcagcaagatgcaagaattctgttgttgtattccttagaaggtgaggaaagaatctatttttggaaagggcttgtactgctaggtaaaattccctttcttcttctattcctaaagaagagacttcaagaggcttttgtttatgtaaaaagactgaacttgagtaatttaacatgttgatatggaaagagtgcctatttctctaatttttaaaggatttgtacctttcttccatctctaacagggtaacaaatgtagtgttaatttagttgagttatactttctatatgagtttgctaacagaacttgacataaaagcctttgtgaagaagcttgattggtttggttgccatggcaacatggttgcatggaagaatgatttcctttaggaacctttcctaaacgctgttttgtgccctgtaacgatactgctagcttgccatcccttgtgaggaggtgagaggagatcactttcagggtcaactttgtgtcttgtgtttatagattatcctcaacaatcaaaagagtgcttggctcatctcattctttccatagctgaagcagttctgttcttctgtatacagtgataataggagcctctcgcagacctttatatcttaaaatacacaaagaaaaaagtgaatctagaccaatgatcatattctgttaagtgcatttcctaaagctaatgtctgttatggatttttaatttcctgcttatctttgtttgacattctgcaatttatcaataatttgtcctgtgaatgatgttactgttttgaggagacaaagggtttaatcagtaaacagatcagcaggggtttcatttaaaatccttagtagtggtttggtattctggaattgctgtaaaccctaaggcttacatttgagatttcctttgttatggggtaaatgtctgctctgttagcacagcaattgtgtacaaaaatgcatcaaatcactcaagtaccaccatagggtgtttttcagtggttaaagcaggctaatggttatttcacttgtacattcaataataacagcagtaaggcctattataaccatttttctaatcagccgcatgtttgcattttttcattttcaccccttgatttaggtccttggaatcagatattccaaaacagacttaatgactttaactaaagaattgtatcaacactgttggtaccagttatacagtgacttaaaagttgcctaggaataattttrtgcaggagatgagggaaaaaaaacccataatctcaaactgatgggaatattttaaagattgcaacactttctaacttttgaccccatgattagtgacaaaatttgtatataataatgtgacatgattatattggagtttttgttttattttgatgagtaaatgttagaatttaaatttttgtaactgctaatggatgctcattttcaattgctaaatgaatcctttcatctgagttgcctgaaatgaccctgctggttaaacaaactattgggaaagactggatcacattttgagcctaactcatctcaatatttatttttgtgtattttggattttgtggattattttggaaaatgtatgtttcagtagcctaccattccctgtgattaaaggtaagccagttaaatttatgacagtagcagcagcagaggcatgatttgaagaacgggaaacagcttatatcagatgtgaaattttcaaatgcctgcttctactctatatcttctttccacatttctctctcactgtcccttttctcaataaaaatgaagagaaaatgaaaaaaaaaaaactaaattatataaagtgatgtcacytttaaatgtgagatatgacaattcttgtccactgccagaattggagccacaataaagctgagacagatttggctatagttgagaacagcatttattgaataagaagaggtagtttcagacaaaatttgcacatttgttctaagttactttctattgatatgaacgctcttctccagaaagctatgtgaatgcacattataaataaaacaagtttcaaccatggaagtactcccctcttattaaggttaagggttcttctaagttaactttattatttttgtagcctttgtctatctcatactagttgtataatccatactatttgtaaatgtatgtatggcaccacttttccagtgaaggacctcacttcttcctcatccttggttatacttggatcatcgcataatctacgtcacagatggtttgtgctctccaaactcatgcccttgtttttatctctgcccttggatggctgtcttctattttcactcacaatttcaacacattttgacttgctcgtgtcacctagggtttccgcctcaggtatgtcttcttccttaatttctttgccgtctttggtgctgttgacctcaccctttctggggtcttcctattggtctcagcttcaggtttgcagccgcccctggtttcctgaacattccttctgtggggtcttcccctccttctcaccctcctctgtttccttcacttaaagcgttctccgtgaagacattcttgcttagtcttgccgtctgccctcacgcattctgtagatgtgaatgagggcacttcatagccgcatatgaaattaccatatatgcagaagatgccctgctctttacttttagccttgactttctggctatagggagggcattaacttttgagtttcaggatggcatccctaggcttaaaaaaaaaatacttgcataaagccacttattatgtgtataatttgtatttagttctaaatcaataaacttttattgagcatcattatgtgtcaggtgctgtgctctggggagataccaaggtgcagaatccatggcccatgcctggcaatttagaggggagaaaaataaatacacctgattacacttcagtgttgtgtgacagaggaaggccgaaagaaatgtgaaagcacctaagagaaataactaactcagactcggagaggggaaaatggtggaccaggaccaaagaagacttctcagacgatgttgtcattttcttttaaatttcttcctcagtaagccaattctttctgtgatattagacagcagaactgtattgcttaacaaagtagctcaggaactcagcaaagcatctcttgtatatttatcaaatgagtaaatgtggcccttttttaagagaagcgagcctcacagctcatgaaaggagagaggaggaaggcccggcgcggtggctcgtacctgtaatcccagcactgcaggaggccgaggcgggaggattgctttagcctrggagtttgagtccagcgtgggtaacaaagcaagaccttgtctttaacagaagatttttaaattggctaggcatggtggcacgtgccttgtagtcacaagtacmgaggaggctgaggcaggaggattgcttcagcctaggaggtcaaggctgtagcagtgagctgtggtaaacgttaggagaaggaaaaggaatagcatgcattgtacttatttcctaagatgcattctgtttgtagcttctttttcaaacttttgaggtccttttgaattctgataagctattcctttgtggctggtgactccctctggcctcttcctccascctctgcccccccgcccttcctcaatgcttcctcctcgtctggtctcatatgcagacttaataacagtgataattattctaccctccaggtcattaatgaaaaatgtccactggagtactgcccagaattgaacacattggagccccatttattatactccctctaaagctgacacttttccaccgatagcgccctgccaggcatgaccttcctgccatttcatagctatgcagtgtagatcctattttctcagtttattgatgattatatcatgaggagcagaagcaaaagctttgtaaaaatccgaatataaattgtgtcttgcttcttcccttgatctactgggctagtcactccatcaggagagattagattattttgacaggattgagtttgcatcaggctatgttacatattactcaagactgttttccttaagatgtgggcaactagatctttttctaaacaatgtttctgaggtaagtccaagatcattactgtctttaaaaaaaaagtttgtatattttattagccttcaagccccaccgagtcctcctctccagagtttgtaaggtttgtcaccttgctatggcattggctaattcctttgatacagtgggttgaaggtcaacatggactaaagattggaaggttggaatgaagtcagtttattgaactcttatcaaattttctccaacccctgcctctcttagttgatctttcttaagtcgttgcacatgtactttcagaatatattaaataactttatcatctacggaaattatttctccctttgagagtaaaaaataagtgggaattgatggatataagtttaccaaagcaggggattcttaattagcaaatacatggaaactttacccaactattcctaggtctataagtaatgttattatccaagaatgactgacattattttctataagaacccatttatatagattcttatgctttaaaatatatatgtatacatgtgtagacctataaatatatatgtacatctatctgtgcatatayataattgctagaaataatgtagcagcttggtaacacagaagaccttccttcacttttttaaagaatggaagtctgttggggatcttgccattctacatttagctttccctaatgagtacttattttttctcttttgtttgtgccatatgtaggataggaacatgcagcctgctcctctgctatttatgttcaagtatccactcagctggtataaggagaaccttgatctttatggaatgtttcacaattccagaattcccccatctgtgttgatctcctcgaagcttccctgtgcagatcttcactcaggcctcacaagcctcaagtccccacccaagtggatgtctttcagatgggaaacgctctgagatccttagcgaaaggtggaaatatcaagaagagtgtgcataggaaacaaggtgaatttctaggttgcatgtaagaaaaatccagtttcagtaacagcaagagatgaaattgaattacgactgcgttgtttttctgggggcaaagatacttttctagactttttcagtgatatgaaaaagcacatatgttgagaatatatacttttaatagttgaggcagtatagcctttcagaaaaaaaaaaagttcatctttgtcagtgattaatgtatttgagtaataaggctctttagagcaggaattaagaatgattgttctgttccttagtgacctcaggactgtttcccgattgggcttgggttatggttatagctaacagagctttgttaaaaattatattcatttattcagttccacaaacactgatgggccttttccagggactaattcagttggcagatttttattgtactcctaccttaacccaggtgctggaggtcataaacaggttgtgctcatagcctaggggggtcaatggacttgactataaatggtgaagttgagtggtataaatgccagcatcttggtggtagaatgttgagctttactgtaaaggattggtactgggaagttgtcgggaagggttctctcaagccgaaaaggagatggagtccatgagtgagatcaagactgcgcccattaattaattgtttgacctgcactatgtttacagtttttcttagttgctggagtagttgctttttgtgccgtaagtcagatccccttggtcaacttcgatttcactcacagtggtgattctctgaatgctgaccgcaccctgcctgggcacagttgtttcctttctgttcagggctttctcccaaaccgaggaagctcagtcagcacttcagcaggtacagttggaaagtgtagtggaattaatgcccctaggacgaactcatagccaacaagggaaaggggcttggaggataaatgcccctgccttccctcatccacagggaagactgtgagcctctgagacctcacgaagaccccatggttgatttttattcttcctttgtcccacttttctctctcctgattattagagttagttctgaagaaaactactgcaagtccttttctcaggctccactttcagggtaaccaaaattcaaatagttgccaatatttaaaaactggagaatggcaaataaaaattcagatctctacttctcttgaaacactaaagacgtgatgactgttagagtgtgttcctttagagcgtgttcgataacccaagcccaatcaagagaaactgattgggcttcagctgatgctgaagagtggctgattcttaaaatgaggtgatctgaactttttaggacatcctaatgcccatgcagtctgaatctttcttcaaaatayccactcagacgctaaaagcaggggagcttgagatccagggtgatgtttgaattgaggctttcaaaggaagaggaagataacctttgaagaaggtaaccaagcaggagggagaaggccctacatggcaatggtaacatcatctcaaagccaaggaaatgggcatgttgtttatatcgccacaggattttttttgtgtgcaatagtctacctttttctttccaaagtctatcatactatggcaaaagatgtagtcattcaatagagttatgcaattctagctttccatcaattacaaaaaatatgactatctaccttgattaattggattgttatacaaacagccctgcagtagtaaacgtccagtgtgtggcagtggggcatatgtttgtcatatccattaggggagcacttggggcccagaggactgatgaattggccyacattgtcttactacacagctgtcatagcttctctgatagcaggtgatagttctgcaagagcgtgtcaaattggagcttatctcttatgacatctgttgatggaagctcccttttaggtttgaaccagacaatgaccttgatattcctggtgaagaataaaggcttacaattattgttttaagaaggagagacttgtagcttgtgcctcacacccgtcatatcaaattatcaggctgaaactgataatacaatgaacactggctctcgacagcagtgttgtatctgctggatttgtacgcagagtaaaccttatgccagctatatcatagaaatcaatggagataagatgtagttaacacctggaatttttcaggtatctgctcagagactctggttgcagagggcaacatctatttcataataatatctttgaggactaaatctttaagaagtggaaaatagtcagtggttgagctgagagttttacagatttcagggaggtgtaaatggaaagcagacagcttctttggaatatggaaaatggaaagacgttggttattgggttattggctccactgttaggcctatgagaccttggaggagtcagtcaacctctggaaatctcgtttttccacctgtaagatgcagatgccaatttctaccctggctaccttacactgtatgtcagagattataagaaacttggaagcacttttttttggttggcaaagaactgtataaacatacaacggtagtattgtttcagtctctgaatatacagatattacaaaacattatgtgacattttaacaactagtattttcaagcttttgttttgtggagatagatgaagtataggatgctggaatgggcaccaagcagaatgaggagatctgttttcaagtctaagtggtgtaacaactagcttggtgaccttggaaaccaagctatggtcttagttagtctcactggacagtggtctctgactttccttccgttcttttgttctatgaatagtggctactttttttttgcttaagcacttgtgttccatctcacagtgttatttcatctttgtgatcaggaagtgtaaacactgttcatgcttcagtcagcggtacttaattgcatataaggcatctggggagctctttgaaaatgtatatttcgggacaccatatccagagagtttgattcattgagtccagtctgggtcctaggaagaactattatcaacatcccatttaaatctagtgcaggtggtcttttgataaccgttggtgtagaacatatatacatttcatgttttattaatatttattaataatttacaaggtcaaaaagatattattttgattgttattttgtattgagtctactgctttacttccattactaaattggctttgcataaatacagtgggccaggattaaccaggattattgagtgtctctgggctttagtgtactatggttttgcatacgtaagtcatattctttctggttttctccatgaaagccaaaaaaaaaaaaaaaaaaaaaaggtggggggcttttaaaattctactggcatataaattttgtatttggtgtttcatcagaatcattttagagttagtgaatgtggggttagcttagcgttttcccaaaagtgcttaccatgaaaaagacttgacgcagtgtctgcacggagtaggattgtggtggagggagcaaatgggagcagcactgtggttgctgttgttcacctctcacaccattcccctttaactaaagaaacctctattccagtggtatggtggcatccttgactcatgtgtgcttctaaatcctaaatcggttagacatgtgaacaggatgttgatgaaagaaaaagacaaaacacgatgatacttttgagtttaaagtggtgtcaatgatgaagagcagggggaaatcaattggggactttcatgaccttgtgcaaaatgcatagcattttcattttgtagagcatacatgtccccaagcagtgtttgaaatttaggtttctaatttatgtagaacttaacatacaagagtgagtacactagactgaattagtgcattcagtggaatacagattctctttagacccattttgccttgtctcgccatacataccactgttgcccaccttcattgtatattttattaaaggttcatctctaagktgaaatggaaggactgtggatatgaaacaaatttcaggaaaggagcagaccacactcgttggaactgttagtaagatcaagttctgaataaccatgaaagacgttttgtgttttatttcataaacttatatctaaaagggtgatgattaagayatgaggtgagctctaaccaaatccatattagagaaagcaaaatccttaaaaaaaaaaaaaaagctattcaaagttctttaaccattcacaaataaaattacccacacagaaaactagtgaaactttctaaataatagtttaattctctcctcatgtgtagttgctttgtttgtttgattatagtgattatagtgttcattagtattgattgggtaggtaggtgcagtggtttgtatctccaaataagctggagtctgtgaaaactcccagcttctattttcatctttttaaagccttacttctaactttgttgttgttgttgttgagatggagtctcgctctgtcacccaggctggagtgcagtggtgcgatctcggctcactgcaacctctgcctcccgggttcaagcgattctcctgcctcagcctcacaagtagctgggattacaggcatgcactaccatgcctggctaattttttgtattttattagaaacggggtttcaccgtgttacccaggctggtctcgaactcctgagctcaggcaatccacctgcgtcggcctcccaaattgctaggattacaagcatgagccactgtgcctggcctacttcccacttctttcagtatcagcagctattctcttaacataaatatttttgtcactgtaattgtgatggaacaaaggcaattcatgggtcttcctacattttagttgtcctacttactcctatgacagaattaggtttttatttccatcaaataagttatatcagtgcaaatgtatttctggcaccattatagtaaatcttagtacagtagccaagtggagggagtgtgtttgagtacttaatktgggcaaagtggtttttaaaatatatttctaacagtaatctaagtatcttctattaaaacccctttaatcagatggaacacattaaaacatcagaacagaacctcaggtagttacagtagagtgatcatgtcatctcttaagccagccaaggtatgaaattaaaatattggctagtcttaaacatatagaattaatttcaggaaggctttgtcaatacttgctggatatttacagataatctaatagcatacactttttaaagctacatgactcatagaagtcaatgtaaaagggggtaagatggttttgtttgagtgtagcaggtattatttacatctctggaagtgttgctgataagagataggtttgaatctgttcattacatatgaatattggttgtgtttttttcaaaaaattatatgattgcagtttgaattttgaaatcaatttactggtgatgtcagcattttataactctttggaaatgaaagtgtgatatttatgcacacattaatatgtgcacattaagttagctccttaaaaatcccccccccgccccaccaaaaaaaaaagtgtaagctggccaggcgcagtatctccatgcctgtaatcccagcactttgggaggccaaggtgggtggatcacctgnnnnnnnnnnnnnnnnnnnnnnnnnnnnnnnnnnnnnnnnnnnnnnnnnnnnnnnnnnnnnnnnnnnnnnnnnnnnnnnnnnnnnnnnnnnnnnnnnnnnnnnnnnnnnnnnnnnnnnnnnnnnnccagctactcaggaggctgaggcaggagaatttctttttttctttcttttttttttttttttctgagacggagtctcgttctgtagcccaggctgcagtgcagtggcataatctcggctcactgcaagctccacctcccgggttcacgccattctcctgcctcagcctcctgagtagctgggactataggtgtccaccaccatgcccggcttattttttgtatttctactagagacgggatttcactgtgttagccaggatggtctcgatctcctgacctcatgatccgtccgcctcagtgccccaaaatgctggaattacaggtgtgacacaccgtgcccagcaggagaatttcttgaacccagggggtggaggttgctgtgagccgagattgtgccattgcactccagcctgggcaacaagagtgaaactccatctcggaaaaaaataataataataataaaaaataaaaattgtaagctgtaaattatagcattgatatcaaaaagattttcctattctgtctatatttatttttctgttttttttttctattgcaattgaggtttataatcattttccaaaattggcaagccrctggctttcttactacgattattgtataaagatgatgtgcataatattttcatttctgataatgggattggattactctgatgttcatgttgccttcaaggatatgtagaatttagagagagaccacctggtcagaaccttcaaatggggwaaatgaattctaattgcagctccaacttgctttgtggacttgagctactcaaattttyggaactttagttttcctactgtaatttgggtaataccaacctcatagaattgttatgaaattaagtggggctaggcmcacaaaaggaaggtgatcttggttcatttttctttcattcttcttatttttccagatactatctgtgaggtataggttctgatcccatggctttgatctgatcagcacaggtctcatgaaatgaagttccatgggaatttctaccaaaagcatgctgtaatcccttctgagcctccccttctttttcctctgttacagcagaaatagaaaaagctttctaattgagtatattcaccaggattctctttcaaatttagaaagcccaggatgttatgagatctgggaggtgttaaaacatcacattagtcaacacaagctatttttatgagtgtacctatctgtcttctctcctggactttgagctaaagtccttgtggctagggatcatgtcgcagttactcttatttcttcagcacactaaaaggtggccactcatcaaggtctgtggaactagaaagaagtaagagttttagagtattctgagtaagaaaaagttcatgccacacgtttctccagttaggagatacatatatattttttggaaggggtggggcgggagggggtgtgtttgttttttggagacagagtgtctctctgtcacacgggactgcagtgcattggcgtgatcacagcttgctgcagcctcgacctccagtgcccagcaatcctcccgtcccagcctcccaggtaattgggaccacaggcatgcaccaccatgcctggctagttttatttttttttgtagagacggagtcttcttatgttgcccaggctggtctcaaatttgtgggttctagtgatcctcctgctctcggttcccaaaatgctgggattgcaagtgtgagccactgtgcttggtcaatataaataaggatagtttgttttaaagtgcctatagatttgtgttattaagagaaatgaggggctgggcacagtggctcacgcttgtaattcctgcactttgggaggctgaggcggatggatcacttgaggtcaggagttcgagaccagacggaccaacatagcgaaaccctgtctctactaaaaatacaaaaattagtgaggcatggtagcacacccctctaatcccagttactaaggaggctgaggcaggagaattgcttgaacccagggggcagaagttgcagtgagccaagattgcaccactacactccagcctgggcaacagagcgagactccgtctgtgggggggtggagggaagaagtgagggacttcaaacgtaaaaaaaaaatccagtagatattaaaagaaaaaacacttttagtgtaagttttggaatattgtttaccaataaataggttttgsacatggctttttggcaataggcttttttccttatttttctgccaaaaaaaggtattatgaataggactaccaaacatgatttcgtactttttcttttcttttttttttttaatttgagacagggtatcactctgtcacccaggctggagtgcagtggttacaagtgagccgatcacagctttctgtaggcttcacctcttagactcaagcagtcctcccacttcagcctccaggactataggcctgtgccaccatgcctgactaattttttaattttttgtagaaccggggtttcactatgttgctcaggcgttataatttttataatataaatgtaagtgtaaagaactcaaaggttaaagataataatgctagaagatatcattgctaaaaggatctgaacagagtagattactaaagggagtgtcaaagagcttccaattgagtttgattttctcatcggcaaaactaatttcactgatttcagtaatcatagttatttatttcctcaggtaattaaattatagggaagcctaataattatggtatacattattattcatattatctaaggtgtacatttgctcagatcagagagagaaggggactttttttcacaaacactttsagatgtgtgtactcattcataaataaaaataatagctaacattggctataagatgactatgtgtcaattgctttacatgcgttatcttgtgtagttcttttaaccgccctaggaggtaagtataattattatgtccattttatttatttaattatttaatttcagagctgaggtcttgctctgttgccgaggccggagtacaatggtgctgttgtggctcactatatataacttcaaactcctgggctcaagtgatcctcctaacctcagcctcccaagtagctgagactacaggtgtgtgccaccacactaagctaatttttaaattttttgtagagatgtgatcttgctctgttgcccaggctgctctggarctcctgggctcaagctgtcttcccaccttggcctcccaaagcactgagattacaggtttaagccaccactcctagcccatctccattttaaagatgaggcaattggaagaatttaagcaatttccccaagaccacataactcctaaatgttagttgtgggttgtcagggccttttccgaataaaaacatatggccttaggatctacaaattgacctagaaggaaggaactagaatttgtaattggaaatattaccacttttgggaacttcctgcaggctgagtgaggccagttttcaggaaaatccagatttcccttaggcacaggctattactcagtttatttgtgcatctcctttcactttcttttgtgattcctttctttgcctttagggcagggagcgtcattaaggaaggcgattgtgaatgttcttctatttgagggcctttaggtgtggctggatagcatatgaagcgtattaatggcgtgagagtcagggaagcaacctcaggatccctgtgatacatggtgtctgaagtagagatttctgtattgctttctacactcagacttgtaccaaaaaacccttcaccatttcactttaatggatgcatctataacagggtgtgggggaacattactcagataatccctgtatttctttctctagttagagtttattaatctgtgactatgggkggatggaaggaccagggctctgaaaaagcctacatttaaagagtatattaagagagcaatttaatcattatacagtctgactccagttatgtggtgatataaaagtttcagattggcgataataaataatattttaggattttcaaaatctttacccttacctcattgagaggtaaagtaagtgggaattatctcagttcacatttccctcctctcccatctcctccccttccctttctttcttttttaaaaactgcttttcagtttgtacagtatgcaaataactgtggtaataccattaagggttaatattgagactaaacagaggtcaggccacatggcacacagtgaaagaagtaacactaggagccaggtttaatgggtaacactcctgtacacttttaaaatattatttatttattcattttttaaattgagacagtcttgctctgtcgcccaggctggagtgcagtgaggccatctctgcccactgcaacctctgcttcccgggctcaagtgattctcctgactcagcctcctgaggagctgggattacaggcatgtgccaccatgcctggctaattttgtatttttagtagagacggggtttctccctgttggtcaggctggtctcaaactcccaacctcaggtggtccgcccgcctcagcctcccagattgctgagattacaggcgtgagccactgtgcttggccaggtttgatgggcaacccttatttcacgttatcatcaaaatgattaaaatgtattcagaatgactgaaatgttacctaaacatcagtgaaacaaatatctaagctccatttttaattccatcagatgatgccaaaatgatcaatatgagacaaagggaagtttattaactatagcaagatttgagaaccagtaattactatgtgagtcartaaaaactgccagtgcatttttatttctgagtttatcctgacttttgtgaccctttggaaggttagttcctgaactaccatcatcatgatcttgtgactccagcaagagagaaattgggaaaggagcaaattatatgtttgaaagctacatattattttttgcacatcttaatccttgcaaaaacaaacccactttgcagatgaagaaactaaggcttagagagattaagtatttgtatcatagccccatagcattgatgttcaaatccaggactgcctgcctaggtttcccagctcctacatttataatatcattcatacaatttttaccaatattattttctgagaaatgtcttttggccatttcagagaaagaatggaattgttacaggaaaggggtcccaatccagaccccatgagagggttcttggatctcctgcaggaaagaattcagcgcgagtccatagagtaaagtgaaagtgagtttattaggagagtgaagaaataaaagaatggctactccatagacagagcagccccgaggctgctggttgcccatttttatggttatttcttgatgtaatgttaaacaaggggtggattattcatgcttcccctttttagaacatctaggataacttcctgacattgccatggcatttgtaaactgtcatagtgttggtgggagtgtagcagtgagaatgaccagaagtcactcttgtggccatcttggttttggtgggatttcgctggcttctttactgcaagctgtttttatgagcaaggtctttatgacctgtatcttgtgctgacctcctatctcatcccgtgacttagaatgccttcactgtctgggaatttagcccagtagktctcagcattgttttacccagcccctattcaagatggagttgctctggctcacatgcctctgacagaatggctgacatgatgtcaaatagaatcacgtgttttttaaatatacatgccttaaaaaaagccaaaaaaatgaagtcattaaaacttttggtgttcagcagtcatcagaaaggcatgatgcatgcacacatacatacatatgtacttatatgtggaaggtagggaaatgaagaagtgatgattgctgtttatcacacctttggagccytgacaaataatggtagtgccgtcctatgcttgtatactttttgtaactcatggatatgaatgtttgtttatcatcttctctaaaaaattatggtggcagcactatatttattatttctaacagaatcttactggtatttgcctgaaaacaaaaagttttttgtgtgtctgggaaaatctgccctggattgactgaagtcacataccaacttgaaaagaaaaaaaaagtgtgtgggggagttgggagatcaaaacattaaaagtgtaattaaagaaggaggatttctctggagcattggtagagtaaataagagtgacagatattcattacagaatgtatctaaacataaaagaataattcttttcataaaagaaaagttaattgaacctggctacatctgctataccatctttattaaggaaggcagaagttgaaagggcagctggagttttcagttggttgctaagactttgagctagatttctggaaagaaataacaacaaacttccttgcttactttacagatactaggaatctgcaaggtaacacttccttcctcttccctactgcctgtcaaccaaatgcattccttttcttttctctttttattaggctgatgtatttagtgcttatatcttccaaactggacaattccaggtctcttccagcagggaaacttcaaagaacttcaggggtcaccctgaggcagttctctttaatgaattctaagctgcctccagggattctttcttataccaactacaacaaaactgaaacactttctagcattatctgtgctaaggttccttgaggaaacctttaaggacagtgaacatgggaagtgattgctaccagactactggtgataattatctgtgtaaataaatacatgcatttattttaaaacagacaaatttgaaagagaagtttcttatagatacctgtggactctgacatgtagataaagagtattatagtaccataggactctaattaatattaaataaagcaatgcatgtgaaattaatatagtatctaggataaatatgctcagtgcattaccactttattggatctttgtattaatccttataataaccctgtaaggaaagcaggctgggcttatgcattcaggctttacatgtgaaagctaggctctgagtcgttattatgacatctcataggcacttaaactgcagcaatgagactaggacctagatactctgacttatagttcattgtaaatttatatcaatgagaagtctgtgactaaaataactgtatttattaaatatgatcaccgaagcactrgtaggagccaatattgcagattaaatgcatttaactacctgtaaatttcaagaaggcacagctttcttgtatgaactgcagaattgcaactcccaccatcaacacttaacgtagagtagatgcttaatacacgtttgttaaatgaatggatgagtaaaaaagtcacagcttttagacgatatggtatactagcttttgaatgcaacaggaagctattctttattaaagatggttcagaatgatttgggtagatttaaacatcttccatttataatctttttcctgtgagtaaatatcagaacttctctgctgatttattgtgcttaggccagcaaacccagaattgtttggttttccattctctaatccgtttgaaagcagtattatctgcattcttggcactttggtatgatttaaaccgttaaaaaatttttaaagtgatgattatcttgattatttcttaaagagttgctggagaactggacttaatgatcctaggatttmccctatatgatcaggttgtttagttattttatttaaagatctaatgtattaagacttgattgggaaaagagacaccaaagaagaaaaaagaaaatttgatccatagatgtatacttagtcatataaaatgttctaattatcatataatgaagtaaaaaaggagagaattccattctataaagcatatagggtagaattccacgtaagaccagcataagactttgagctttgactcaagttaccatttctcttgcaagatagattctgttaaggttgaggtcaaaggattgcttgagtccaggagttcgaggctgcagagagctatgatctttgccactgcactccagcttcggtgacatatcaagactctctaaaaatgaaaaaaaaaaaaaattctgttaaatttattttctgagagtctgtcctgttctagacactaaagtgaataaatacaaatatgagaasacacattctctactcttgaggaccttggagtccaacagagagccaaagacaaatatgcaaatatctttaatacaaagcatagtgggataaatggttcagcttttgctcctggtgagatcagtgacaggaaaatcacatgtagttggtggatgagatagagcttcacagatgtgatagtgtttgagacagttccagagagtttctgctggatagtgggatgtttgataagcaagatagaaccctgtggtaagggatctcaagggcraggcgatcttcatagtgtgtgatggtgcagaaagaacttttcctaactgcatcatatatmgcttagacatcctttttgcatatcatcaagattctgtgtgctagcaccgaataaacaaatcaaagttaagcaatctatttgatagctttggaaaatgaattgatggtggaagagtttggtattcatgacttttcctttaaatgagcttttcatattattgtacattatggttatcgtgagaagaactaggagtaaatctcttggccataaggcaatcgtattaggatttacgttcatttgtagcttgaatttattttatttatttatttttcatggtggggggctttctggcaaaaattggaaagcctgctagacaaattcgaaaagcttgaatttattttataacatgatcaaatcttgtgtgctttaagtctcttgaatatgtactaatagtaaggcgtatcatgttatggcagttttcagtttatcccaaatggttggggaatggactgtttcaattaatctaatgttatagtagctaagagattacagaaaattttacttggattattcaattccataaactagaaaaaaaacaaaaattttaacatggaaaatactctgaatataatttgaattgaattttatatttaattatttagaaagctctttcaagttctaggcgatgtttgagtttaccaatgaaagtgtttgttatcctttattttctagaaaataaattatgggaacttgacataatcctggattaaggaaatttgaatttctcaaccagaagattagagcttccatgtttagtctcctacataaatctattatgtgaataaaatagaaattgtactcattttcaaagccatgattatcaggcacatgatgatttgatgtgataagttatggcttttaagttactgtcatccaaataaaaaagccacagataactgcagagtttttaagaaattaaatattgggaggagagagacagttaaattccatatttctacttgatagtcacaagtactctgatgactgataagtattgtaggctgtgcaatactcacttactctragctkctgataattgtaatttagtgggaccattcttacatcccagtgtcagcctactgaagaacattttgtattaatggtaaaggtcaaatgtttcacaggcttccactagcccctattatagaatactgttcagttttatatatttaaatatttatcccccaaggaaatttgaaatattagattccagtataattaaaatttacttaaaacttggcaattaagaattggggcagttcatctctaattatcccttcatctatatgtttttaaacatgcagatatagataaacatgtatattcctaaacatctattggcctatagcattttctgctgtggctaccaacagtatgcatagattatttggaaaggcttaacttcatacgtttttgttagaaacctaaacctgcctttgtggtcatcatagtttatcatttggcacttaatttcttcagaagtgttttcttatcgaagttaaaagaactttgctccatagtgtaactatacaaggtaaaaagtgccttttctttttttttgaacatgcgacttggtgcatacttttatgcattttgtttgagcttatttttcaaaatgagagtatattaacaaataatcttctcctctagatcttatatgttacatagtgaacagtagcatagattgctttagataactttgactttagaattttacgcgtttccacttcataaataagactttgtaataattttctaactctaaaatttttggactgtcttaaaaggacattgcaatctattcttacgtgggctatgatgaaaatattactgagatagtgataaatgatatattgattgctgttactccgtctccacaacccaaaagttttcatctatcagtccagtgactgtggtattggtggtggtatccaatgtgtgaaattaattctccatcatactttcttttgtgtaattcctaagtaggctatttaattttttcattggctgggtgtggtggctcacacctgtaatcccaccactttgggaggctgaggtgggcgaattgcctgaggtcaggagttcgagatcagcatggccaaccgtggtgaaacsctgtctctactaaaaaatagaaaaaaattatctgggagtagtagtggtgcctgtgatcccarctacttgggaggctgaggcaggagaattgtttgaacctgggaggcggaggttgcagtgagccgagatcatgccattgcactccagcctgggtgacagagtgagactcatctcaaaaaaaattttttttttcttcatataaaataaacataggggtggatgatactaatgttttcccattttggtagtgcccaagaaattaaaatgacrcctttaaatgaatgctgaagatttgaaaaggttccatttttgaggctaagagatgttatgaattcaagaaatgtaagtgcatgccaagaagataaacaactttgttttaaaattgggttccaaataattaatcagcagtacaaaaaaattgacttatgttcctttgtatactgtcactcattgaccatttatcccaaggcatttggacagtttgatgtttttttttttcatgatcataagttcatatgtaatttttccctaaatcctgagtcattgcattgttgctgcaattatctaaaataacttactcctnggtttgckctttcttgttaagttcctctgaggcaagtcagtgaacttaaaatctctttgaaaccaagacaactctgtaatttatttctcattttagggggaagttrtgttgctgccctcaaatttggcttctgctgggggccatgacacatgcctgtagctccagctacttgggaggctaagacaggaggattgcttgagcccaagagttsgagtccagcctgggcaacataatgagactttgtctaaaaaaaaaaaaaaaaaaatggcttctgtgaatataaatgtcactagagagtgtgaatataagtgccactggacagtctactgtaattatttggaattctttcaaagtagtgtgatatagataaaagatgattttctacacattttaccagagtgtaacctaacgggcagcagtatgtaaaatgggcttaagtattattttatttccatatcctytggttcttcagttgcatcccctttctgccttaagttaaacatattgcacttccatctgctmtacactatagatgattcacatttattttttgcagtgatattttttaaatgagtttagggagcagatgtttttgcattcatacttgccttccttttcctgatgtctttccacaaatacagggggaaaaaatgcattgctgctgtccttggtgaattttgcatatctctttgattcaggctgctgcactgtaatgcatgataatgtgacaactgcagtcaagtaagacgtttctttagtttcctagtactctatatcaatatcacagctgtgctgcagggaatcgaagaacttcttcagctcttggtaattctcctttgggtaaaagttaatccagccagacctcttcctctgatagccttcagttttgagactgattttagacaggtggttatggatttataaatgaactcaaaaatacraacctagatacatagtgtatctatagcacactttcagtataggtttttttttctgttctaatatccaartaaagcacttgcgttattttaaattacatgcgcaaatgttgtcagtcttgtctgtctttttaaaaatgatgtctaacagaatattatggttatttggcaaacctctgcaaacaaaagtgttctgaatgcaggtgtaactgtgtagagtaggaagagcactggactcagaatgagaagacttagacattgtcatatttattgctttatgacaaattatcccaaasctgacagcttacaacagtatatacttattatctcatattttctgagggtcaggaatctgtgtagttctggctcagagtctctcatgaagctgcagtcagaatgttagatggggctgcagtcatctgaaggtttgactggggctggaggatctttttccaagatggaagtttgttgacaagctttcttacttccattttggaccaaggaaccctcaattccttatcagttgagttccaccgttggactgctcacatggtagctggcttattccaaaatgagtgatcaaaggaagagagagtaagagccaaagatagaagctgcttataacctaattgtagaagtaacataccatcattgtatggcatgcagtaaccctgttacaatgacagggctacagacaatatgtgcatagttggaagcagggataattgagggccaaccaggaggctggctacccaggtacgagtcatctgtttgccgctaaagygctacaggaccttacataggtcgccagcttcttgagcttgagtttccttattggcagcaggggcattgtaccacttttcctactgatcccttgaaatgtaaagatcttaaatgatggatgtgagagcattttgtaaatgtgaagtagctgtaactgtgggggttgattaaggaatcatattactttttagcagtaataaaaggaaagaaaaaagagggagagaagaatggagagaaatggagaaaaggaaaaaggggcaaaaaaggaaagtgtgtcttttatgagcaaggacgagaggtctttacctctagtggaggcttttgcgtcttcttctatcaatagttaaatttaattgctcacaaaatgtgtgcttaaatatatcctcgagatatataatttcattttttaaaggattaaacaacaacggaaaggctatgacaagcccctcttctcagctggggcagatttgagtaaaatcaaatgaatttaagtcagtagtccaaaagctagatttcagtcatcagcaccaatatttcctcattgtcttcctcaaaaatggaactgaatgctcacctccattataaatgcttctgccgcccattagaaaaggacagctaaggtagccgttagtatttccataagccactgaccttggctccgtataaactagaatctagaaagtgactgcatttattatcatttttaatgcgtatgttctggaactcatttcccctatggatgactttcagtttcattttgtggcatccaatttgtggagacatcttacttttagaatcaaagtaacaatctctgtagtacaataggtgactggagaccatttaccaagtggagtcataagtacttcaaattcatgtgtccaaggccaaatgcattatcccctcaatctaccctctgcatatacatgctatattgatagttatttgacgaggtcattttgacgttgtctaaaaacgaactatttcagctttttttccgcccttaagaaatgattgtgacagataatttcacacattccctcataattctcacacatttcttgcttcattacctcttcagtccctgaccttcactctcccttttatctgagacctgcgtcagggaaggataaaggtctggctgtccattgcagtcattccctggccttaaaacacattgttttcccgcattttgatttgatcattttgaaatgttccctaagttaaaacacctgggtcaaaagagcttttagcctgtctagtatccgtccattaaaaatgacttctcttcaccagtcacctagttagccagtcagcatcctcagtcatctcacgttcctttctttcccctcaaatctcatgttcagtccacaaaccctcatgatagtagctctgaaattcctttgaatttctctcctccagaatcgcttgaacctgggagacacaggttgcagtgagccgagatcgccccactgcactatagcctgggagacagagcaggactctgtctcaaaaaaaaaaaaaaaaaaaaagtctgggcatggtggctcatgcctgtaatccgagcactttgggaggccaaggtgggcagatcgtgaggtcaggagttcgagaccagcctgaccaacatggtgaaaccatgtctctactaaaaatacaaaaattagctgggtgtgatggtgtgcgcctgtaatcccagctactcaggaggctaaggcaggagaatcacttgaacctgggaggcggagtttgcagtgagcggagatcacgccactgcactccagcctgggcaacagagcgagactctgtctcaaaaagaaaaagaaaaaggaaaaaaaaaattgtcttctcctctgcattgtattctttctacatcctttgtcactgtttctcatgtttaccattttaatttccatgtaattggcctctttgaggattctactttcttctgcctttagttcactctctccatagaagccagttgccttaaaaatcctgatgtaatcttgatattcaccagcttcaaatatggtgtgagtctttrttggctatagcagcactgcctactatcactttcctcaataacaaaagcgttctgtatcttctgttttgtccagtatagagctagtaaccacacgtggcggttgagtactttaaatgtggatagtgagactgagggaccgaatttttacttttaattttaaattaatttaaatagctttggatagcataggtctatagaataaagtacaacatttctgttttgtcactacccccttttttttttcctttccctacatactaagcaaatatacaaattgtatgtatctaatgtaatattttgcaaccttttaacctcaatccacactaaaaaatgttttctcttgtgactaaggtatgcttagatattcatacatgcttaacaagtattaatttatcatctagtacgtacaaagcattgtagatgtatctgtgaataaaacagatgcaggcacctgtagtcccagctactcgggaggctgaggcaggagaattgcttgaacctgggaggcggcggttacagtgagccaagatcgcaccactgcactacagcctgggcaacagagtgagactccatctcaaaaacacaaaataaaacaaaaawcagacaagattccctactctcctgaggctaacactttattggacaagaaagacaatgtataataaataataaatttatttatttttttataaatgaggccaagtgcagcggctcacacctgtaatcttaatgctttggaaggcagaggtagaaggatcacttcaggtcaggggttggagaccagtctgggcaacgtagtgagatcccgtctctacaaaaaataaaaaaaatattaggcatagtgatgygtgcctgtagtcccagctattcaggaggccaaggcgggaggattgcttgagcccaagagtttgaggctgccgtgagtgatgatggcagcactgcaattcagcctgagtgacccagtgaaaccctgtctcaaaaaaaagaaaaaggcaagtaaataaataataaacacaatgaaagtgagttgtatagtattgtatagtgtattagaaggtatagtggaatttatctgtcatttccatatggttctttttgtgtcttgtttaagaactgctttctaccctccagattcaaagatacactctagtcttttctaaatgttttatagtgttaattttcacatttaagtcttcaatccacctggaatttatttttgtgtatggtgtgagacacgggttgaattccaccccctcccgatatgggatgctaattctctgctattctggttttttttaaagatgtttctgattgtaactcattaaattgattttttttgcccctcaataataaggtactagcagtttaaaaaattgctctactgtttctaaaccacctcttaaatgcccagtggcatttacattgccaataacggaatttaaacttgaactagctaaaaacaaacaccaaagaagacaggagtgctaatatgggtcacagaaccttaaggcagggatgcagccttaggaatagattgaaattctactgctatgtgtacatcaattcatacatttttctacagagcaggtcagtgggaattacggctactaacagttcctgagctttacatatcatgtatccaactactgaaggaagtctgtttccatttatgtcccacattttcattgacacattttgggtcagacaaccacctctgtgccaatcagctatggtggcttctgctgcaaaatgtggcagatgagaagagagaacttttgggccaaatgctgaaaaaacaattcattagtagaagcattaagtataatctgtgtctcggggtgcctttactcatactctaattgagcccataaaatggcatctttggtgatgcctttggagtcatccttcaggcagtcaactggcttcctctaagcaaatgcttcttactggcctctcacagtactgcttcttataataattggaatgactcagtcctgtgtctgttttagctgtgaactgtgatgcatatatatagctagataaagttatttttatgtaaagtaatgtgacattgataaggtccagtaaacattaaattggtgatataagaacatcataacatgtaagacatcttgcctgtactggattaaatttccatgaacttccaaagttgtactgcacattgcatcaattcctgagtaaacagttggttgataaatgaattctgttcttcggaagtgggttggaagcaataggattgacttgggctatttttcctgatattttaaatttgattttgcacttgaaaacagttatggctgattcgaatgataagaaatgtcatcagtgtagatgtttgttttgattttcctccataacttttcctttgctgattttaagggaaacgtttttaggctaagttaaaaaatatcatcttggccgggcgcagtggctcatgcctgtaatcccagcactttgggaggctgaggtgggcagatcatctgaggtcgggagtttgagaccagcctgaccaacatggagaaaccccgtctctactaaaaatacaaaattagccaggcgtggtggtgcatgcctgtaatcccagctactcgggaggctgaggcaggagaatggcttgaacctgagaggcggaggttgtggtgagctgagattgtgccattgcactcctgcctgggcgacaaaagcgaaactccatctcacacacacacacacacaaaaaaaaaaaaaaaaaaaaaaaaatcatcttatatgaaccraaaatatttggctatgtttttccattatggccatggttactcataaccattttttgctttcttaatttagttgtcctaaatgaattttgaatgcagaataacagatgtgatcaagcacagaatgttttcgatacatcctgttattaagaaaaaaatttctcccttattttgatgtaatggaacattttcacaaaagtaagtaactaaactggattcatttacttctcaaagttagcaaatcttttacttctcaaagttagcaaaaagcaccttttaaatgtaaataacacttgtagatagggttaaaatgagttttaaaaaaaggtgatagctagggtgcaaaatgcttcctttctagaggttgaaattatagtaagcaagattatccatcattcatttggaagatgactggggtggaggcagcatgagttgtgttgctggggcagacatgacataaagggtagagtcagtacacatacttgcaaagatgtagttatgagacctaatrgggacctctctcctgtcttcctgtcctgtcccatctctccttccttcccctcctgtcatctccacatgactcccctctaatcttctctcctgctccgtttctctaccttcttcaactttagatatttcacatatctttccagggggattgagaaagatccagatggatctaggctttattcaatatcttttttttaaccaatatagattattgtgtacacccctgtcctagacattaatagactagaaaaaggcacaaattatacatgtcaactgggggaaaatgagaaggtaaaaaattttaagataaagggcagggaacaaattgtcatcgtcagaaatgagggatgtttaaggggttagtacccatttttaatattagagaaatrataatcctcaaagcagctttgactccatattgctgttgctcaagtagagtaactagaagctgagtaaagctagaagttgtgtgttgaaagtgttgctagaaaaatctgcttaagcagcatgagtgtctagcttcccaaggtaactatggaaaaggatgcaatagcaataggaatgtgtaagttctgggctgtttaatatagttttctcaggtcaggcgtagtggctcatgtctgtaattctagcactttgggaagctgagacaggaggattgcttgagcccaggagttcgagaccagactaggcaacatcgtgagaccctgtctacaaaaaaaagaaaatattagctgggcgtggtggtgcgcacctgtagtcccagctgccactacactgcagcctgggcagcagagtgagaccctgtctctaaataaataaagtagttttctcaccatgctttatatttcctcagcagacacctaggtatcataattgaaataaacatttccttaggtgagatacttaaaatagattcacgctctgggaatcagtttgttaatgaaaatacacccctcgccccccgcccccccaccttttttttccctgaggattcaggtataaaactccaaatgtttgactgggtgtgatggctcatgcctgtaatcccagcactttaggatgccgaggcgggtggatcacctgaggttaggagttccagaccagcctcgccaacgtggtgaaaccccgtttgtactaaaaatacaaaaattagccgggcgtggtggcgggcgcctgtaatcccagctactcaggagactgaggtgggagaacagatcttttgaacccgggaagcgaaggttgcagttgagctgagatggagccactgcactccaagctgggcgacagagcgagactctgtctcaaaaaaaaaaaaaaaaaaaaaaaaagaactccaaacttttccttttttgtctgcctggaacaaatttcaaaacatagtgcctaatacctgcaaaaatagaaataaccacggcattgaacacacttcagtaattgttttagttgaatttataggattaaaacaatttcagtgttgactgtttaacaaaatgaaactcatagttaacacaggaacaagttcaattatctctgagtcgttaatttatgaatggttccatggccattttccatagtaatgctgaatccctcccaccctaccttgttcatattctgggtcagtatctgaattgccactagcggtgaacaatgtgtatgaggtacacacacacacacacacacacacacacacacacacaacaaattaagcggcttctcagactgcctgtctggtgtttgttatctatctgtagcaattggaagtgattctgttgggccatctaaagtgcacattataaaggaaaaagattttgcttttgtttccttactagtagccatagaaacttttaaaaaccatctgtaatacattacaggagagtttttgtgttccttatgcttttgctagtttctatttgtattatctgtatattgactataacctcagctaccctagtttgaagctttactttaacttactgaacttgaaggaattacagatatttttactcaatggccagcataaccactccttgtttagccacagtacttttatatggcttcagtgtgcttttatttttgtactttatttgttaagccgactggcagtaattctgtgacatggctttgactgaggagttgtagctggtagccacagcctagctgatggtctttaatatggaggcagaggggctggcaggaagcaatagtaaggcgattcacattagtttcttttactgcaagtgtgaatacacactataggtcatcaaaaggatattcaggattttgtattgtggtttggacagaaccatgactatgtgaatttactgaaaaggttcttgttcttttgcctttgtagctaatcatatgtaatacaagtcccctactccagccagattaaaaccatgggtaattccttttgcactaactcttaacatcttcaatagttatgccggtatgactgggtttctctttcattgattagtgtttttttcccctgttattcttcatcatctccttgtttcagtctcttttaaatatgtgttccctcttaccaaatttcttttcttgtacatatttgtgtctatacaccaagtcctgatttttggtgggctgtgggaggccttgttgtttctattgaacagcttcataaggagcccagctgttagctgtcaagggttttctcttttattagtctcagaaggcaggactggcagggtgcagcatgttggtacaagatcccagctgttgtaatggtgctctcggagtccctgatcatttgaaacttgaagaaaatttgaccttatcatggaagttgtttctgtttgttcatttgtttgtttttgaggggctcgcagtgcaagataaaaagatgtaaatgrtaactgtaagatatggaggcagtatagagaaaaacgcgtgtttctgcttttcaaactttttagtagcagacatttttggtatggagagtttaagatacaggggggatgttaactaatgtggatgtagagaaatttgtcctggcatatctttatttggtaagcaggctaagcaaacttagcaaaatttattcacgctttaaaaacatgagataagagctctttctcagaggcacactcttaaaagttttgccgaattggaaaggttctgacgctgtttaattaaaagaaaaatgcaataaaaccagattctgtttaaaaggattttgcttctttatgtagccttgtctttcaggttctctgggtggcttctctatgccaggatccttgggaatagtttgataagccgaccaagttattgaataaagagaatcatacaccttaagcaatgaaaatatctgcctttacttcattgtgaaagattgacagacaagaacacacgtaatagcatgcatttacgtttaagaaatgaaatttatttaaaactgggaaccttgagagaaaagcttggttgggactgagtcattacccagttaaaaataacctttccaggtcatgtcgttttgtttgccacagtgaaataagtttatttcagcagaatgaagccattattagcttggcagagtccacttgtcagaattttatggagcacaacaccgtttggctgggaaattcaataaatactgtaatgtgagaggagttaaactccaagggctgaaggggcaaagagtggaggatttgttgctaattcattgtttcacagctccartaagaaagcatkaggatatatgacgaattatcattagaggtcaggcgcacaaccctttcgtgaattaccaaagcagcaggacttgtgagtaaaataaaaactttaagctgtgttaggatgtatagcactgaaggggtagcgtaaatattgagtgtctcgatgctcaagttttttatttttcttttttggagggtaatatgtcttctttacctgccctcctgctctatctgggaatttgtaaaggaataaaatacagttgaaaatcctatgacagtagaatccagccatcagaccagtactgcaatattgaaacggaactgagccgtttgtcatcttaacaatctgggaaaccaaagcagtggccactctcaagcaccagtgggcttcaccttgaggtatgaggtagtgtgttctaatgaccagggtatggtgggactaaattcctacttctgtcacaatgtcaccgttgacaagttatgtaacttaagtaggcctgggcttttttatctgcaaaacggtgtcaagtaatagtatttatttactccatagaatcacttggggataaaatgaaagaatacatataaaacttcagtacagcatccatcatgtagcaaaataaaccgtaatgacttcatacttttcagttgaatttgagtaggaaacaccagttactttatgatatacagaaagttactaatactaggaaaagtctttaactttgtgggaaattaataactccaacattgtgctctatttatgtcattattcattcacttgtgaatgtcartgtacaacttttttatataattacaatcattttgaactttttttgttctgactttaaaatggatttctttatgaaaatttccgttcttcgttatgattcatatatgatattttcaagtttaatattctggtcatgttgatatgctgtaatttgctcgaacttcttgtggtgggttgttgaatttaaaactgaaattgagtcttgaggaatggstaagatttagttggatggagaaaaactgcaagggtagagaagaaacctattttgagataaaacatcactgcttacctatttggagcttttctggctacgtagactattgaatttcacatgaaaaagaagtgtaggccaggcrtggtggctcaggcctgtaatcccagccctttgcggggggccaaggagggcagatcacgaggtcaggagttcgagaccagcctgaccaacatggtgaaaccctgtctctactaaaaatataaaaattagtcaggtggtggtgtgcgcctgtaatcccagctactccggaggctgaggcaggagaattgcttgaactcgggaggtggaggttgcagtgagccgagattgtgccactgcacttcagcctgggcaacggggcgagactccgtctcaaaaaaaaaaaaaaaaaaagcgttaagtatttctgttttcatgagtgtctcagcactgaaataggttgagggttcccttcccatttaccttgaaaagggtgtttggcatatgttttagccatatgatgaaaagaaattgaggatataaaattacagttagataggaggagtaagttcaggagatgtattgcacaacatggtgacacagttaataacaatgtattgtaaacttgaaaattgctaaaagagtagattttgaatattttcaccataaaaaagttgttgactacagttaataacaatgtattataaacttgaaaattgctaagagtagattttaaatattttcaccgcaaaaagtgaggcatagatattttaattagcttgatccattccacaatatatacatgtatattttgtatatgtacacatatgcaattttataccataawcattatggtatgttttataccataaacattatggtatgttttataccataaacgtaaaacattatgtatacataataaacatacataatatgcataatatatatacagtttttgtccgtttgaaaaataaaaaaaaaaagaaattgaggatgtccactgctaacaccatacttttaaattgatttactagaatgtcttatggatggaccatgagctgacccacttgctggcctgttaggcrtacagagtgacatggaaggacctttcacaatgtgataagttactaggaccttaaatatagagaagacactaaacttgttttgggaaaacgtactcattgtaatatgaaagtatagtttgcatcatttgcttgtcagcctgaccttcctgcatcccctgcacagtctgattaagattcagagagccttggaattcatttcattaaagcactgccccagagtccattattgcaaaatattagcatagtgctccatgtgacctttaaaagcttagaaaatgatagagtttgactctttctttattttagtgctttggataatgcttttttcctgttttcctatactaatgagttgtactcttactttaaaacctgccttctgttttcagtaaatcttttgacatatcttttyctcagctaggacacaggtctcctgactgtgtctttcttctttcccttactacctttatctcctaagggtattttccttggaactggtaattttcactcaaatggattaatatggataccacaccacaggcttcagagacagcttttaagccttctggaggagttgccaaagtcatttaaagagcagccccctgactcttaagattctttagataaagagtgcacctctggacagctgattgccccctgccgatgataaattctctttcttgtatcattccttcagtcttgaagtggtaccaaggcaaagccttttgctggtcataaactgcagaatcttttaatcagggactggaaaaaaaaaagtggttggtgaaattggagctaaccatcccscatcctcctattgaattgtacttgtaaktacagttaaacctaaagagaagatttcttcagagtgtaatagctcccctgggtatttttcactggagcaggttaatttatacttacaatatctgaccacagctgatcaatagcaaatctgtgatgtgcagaaggaagcactggagatactgtaagcaaacgtacctccacaattgatacacatacaaccacttccgagattatttttggcacaatctccttccttttctggcatctataaactggggtttaaggatgacttatttgtttctttacttacctcaggattttgaggatagaatatttcttggccttgaaggtcatgcatgataattcatgttcacatgaggtagattctcaggccttgcctgagtctagtttttcattctactgactgacacacactgagagcctggctctggggttgcttcgggtacctcacagagagaataaaagcaccttggcttggcagaaactaccatggacattttttgttagacttctccggtacctccttctcccagtgttgcaaaattaatccctccgtgtctgaggaaaacattacctagtctcaaacactcaggaggctcctgattaaattagaaacctgagtctagtaacaaagttcaaattcttggctattgtgtctgctgtgcctagcgcaggttgagctcagaattggtatttaaggaatatttttacatgtttacacctactctcggggaaaagggatggattggtaagagttcctaaatttatcaaatgagaacctcttgaataaatggcctaatcctgtgcggtggaataattatctagaatttttactgaacacmaggtattatactttataattttgtgtcaataattatgatctggtgaatttagagtcgttttatttccttttgtttggaaaatgctattcttagtttttccccagaagggagatcctttacagatattctcagaactggagcactgagggcttatgactttgaatgtttgacactttaacttttccctcactaggattttgatgttacattgtgcagtaagatgtaaagaatattatggttagtaacagtaattattcagttcacctggttaccactgctaatcaaaatccaatggaattagagtctttgtaagataaatgacatctcttgttgatcatacccacagtccaaggagtatccttaggaccaaaaaaaaaaaaaaaaaaaccaacaaaacatcgacataatgtgtgagcaaatatgccttcttgggccctgctgactgcagcattcacaaaaccccacgatttggctgagtttgtggaacgccagcctgaggcatagaagcttgtttaccgtgctgattaaaaggaaagcttgaaatggctgaggagatagtggcatctctggctctgtgtgtgtgagggagagaggagcagggatgggagaattagagaaagagagtgggccttggtagtgttattcctagttgtaataatatgtatgacagtctttggtggtgaatgctagctttacattctttctaataattggaaggataaaattaacatggaaacccaaccccgggacgacacattaggttttattgaagccccgccccacctcccggccccacccagcccatgacatgtgatgttgaaaaggctgacagataactgagagatgttttcatctctaaaggaggggctgggtaagtacttggttgccttggttaatggtagaacaggttccaaaaagaaaagaactggaaagggagaatgaattaaaatggcttcctattgtattttgcttaacagattcttgttgttctttatattattcgctcgctctctctgtcttcctgctgttatttttctgtcagccttctgctatgggtatactgtctttccatcagggtataaagggactagttctcctctcatctcctgtctttagcccagggcttgcctctgacattccctccaccttctttttccctttgagctttacgtttcagagtggatcttaaataagcttttacatgatttagagtgaagatatcataaagaatcattgtgttgctttttaacactgctcttgaaaagtaattttcttggtggtggtaataaaacaccttttaccatgtgttgagcagtgtggtaaattctttacatgtgttacttcactgaatccattgagcaaccctatgggctctgtatgatattatttccatttttatgtgataaaactgaagctcagagtggatgaatattgtagccacggtctcagagtggacaagtgggaaacactccatggcctcctagtttcagtattactgatctttctaagcagatctcctttctgtttccagtagaaaagggcttaagtaaacagtggaatccacatctcttaggcagtagaaggtgctttcctcaacaaagcagaattggtcctgtggagcttggaagtcacggcccaggacccagcgcaagaatgagagcaaaaagacaccagtgatcttgcagcatgaagtcagtttcagtgttgggcagattcgcagctagtaatctgtccagacacggtcgctctgttatccagaggtagcgagaacttctcagaagttagaggaggctgagctgtcaggaatacaacagatattggccaggcaaaagacaagacttgaggcctaagataaatcaaagaagaaaggaactttggtgtctcaaaaatatgataaaaaggcaattatctcaagttttaagaagggaataatctttattactaattttggctcattgtagtgaaatgttataatttgccaatcagtttaaattgtctagcctgtggctatcacgccggccttaaattagaatacatacatacatatatatgacataaaaccacctaarcagtaaaaagtagcatgaacctttcagatggaaatgtaatgtattaccacagagcaacagtagtttctaatctgagagcccacatctgaattacttctgctgagaaagcaagtaaccaatcctagacattgtattttgttttgaaagcattgatatggaagacgctctgtggattggttaataaatacctcaggatggagcccaaaatttcttctgttgtatagaggatgtttttcatggtgggttgtaggaaggatttcatgtgaaactacaatttgataaaaaatgagagataatcactatgctttgctccagtcactaaaattaggtcccataggatcatatctttggtacaatgaatataggactgcataaatcaggaagtacagtaaataaggctttcaattcaatttaayatatgaccagctctcttttatcactgaccttcataccactgaatgtttacagatgtgtcatttatttaagattgctaagtgttggactgacttacaaaaattaatgtatgactcactcaaaatgggatacacattctcaggacagttttaggtatcttaaaaaacaaatgcactagctgtaaastttttcctagattatgaaatttcttttgacagaaaacataatccacaaaattgtctttatattttgaggaaggaggtatggcaactactttcaaaattacgtaaaaatgtcttgctgttaactactgctagtttacattgatgtcatttttctttaatgctctttttttttccagaaggaaatataaaagacaaatgtattaatttgtcaaccagttgggtaatacctctgtttaaatttcattcttaagcatactagtttaacaaaaaagttyaaatgataatttactctttgggagrtggaagcaggwgtatcacttgagcccaggagttcaagatcagcctgggcaacatagtaagacccccatctctaaaaaacaacaacaaaaaattaggcgcggtggcacgcacctgtagttccagctacttgggaggctgaggtggaagatctcttgaggctaggaggttgaggcagcagtgagccdtgatcctgccactgcactcctgcctgggtgacagagtaagaccatatcaaaaaaagaaaaaaatgtatatatatatgaatagaatatatttatatactatacatatgtattacatcatatttatatattatacatatattatacatatgtattatataatattcatatactatacatatgtattatataatatttttatattatacctatgtattatgttatatatttatatattatacatatataatatatatataatacatattttttaaagggtaggacttcaaaaaaaaaatagcctattctaaaaatttaaatgtctttgtttctgaatggaatccctgcctctcaaatgtcctgttttgtggctatcactcatactgctgctaaaataatcttacagagcccattggatcacccccatcattgctttcattttaataaatacttattcttaggctgggtgcagtggcttattcctgtaatcacagcactttgggaggccggcagatcgcttgagcccaggagttcgagaccggcctgggcaacatgacgaaatcccatctttactaaccaaaaattagctggacattgtagtgtgcacctgtagtcccagctacttgggacgctaagtatcaggatcacctgaccctggaagatcaatactgcagtgagccaagattgcaccattgcactccagcctgggcgatgtgagtaagaccctgtctcaaaaataaaaacaaaaatgcctacttttgaggtgtctagtttaactttgacaacatcccattttacccatggcaaactgagccttagtatagttgtatgccttgtgcagggtccaatctcaccttttcactgtcccaaaatcagggtgcggtccttctactcttccatcctgggacctataattatttctagttattgagccaaggaaattctatgatagtctctgggaacatttgttattgtctgcttttaaaaatcaaagaaaatgaagcactaccaaaccaaatcttcatttctttttaattttaactcatagtttcgaagcattttttgatttactgtccatcaactttacctactgctaggagttaggactsgcccagcctaaatgaaacatcaagctgttcatgtgaatagtagtttatatcattgwtacyattcttcattcctgcagattattgcatcwtttttttttttccattttcaaattttattttttagagagacttggcctcastatgttgtccaggctggtcttgaactcctgagctcaagtaatcctcctgccttggcctcccaaagtgctgggattacaggtgtgagccaccatgcccagccaggttattggatcttagaaattagtggtttataattgagataacasagcatcatgcaaaatgcccatgcagtaaacctgtgyatgtaccccttgactctaaaataaaagttgaaattataaaaataatatttgagataatagaaagtacatgtgrctaaggcctttccagttttttttgctcccaatccaaagcattagtatattccatacctgttatgtactgcatctcacctaattttggcctttccagggatatggctttgctctacatattatgcagagagttcaaagttatccatccttgtttatttcctagtccacagcaagaagactatagcagtgtccccagtcttactgcctcaggaagcatgaaagcttaggcaacattttaattaaatgttgccccaggtctttattcttgctgagaaagtaaacaaagcttaaacagaccatatcagaaaaaaagacccccctgaaatgttgtttttaaaaattatgcctcaccttctgctgtttgctctgacgtatgagacattttttaatgatgtattttattttaaataccaatacaattaattgattcaaagttcattccaaagatgttagtacctgcatcacttaaggcatcactggacatagcaattaattggagacttgtgggttattatttggccatggcgcccgatcaaaaattgttcctttctgttgccatccctagtacagggtggtagagactttaatttttcctttatattcactatattttcaattgaaaatatggcaccatataatgaagtatcttcgtaatcaacatttgaattattgctaacctctaatatattttctccctttaaagttacttttcatggctgggcgcagtggctcatgcctgtgattccagcactttgggaggccgaggcggggggatcacctgaggttgggagtttgaggccagcctgaccaacatggagaaaccccgtctctactaaaaatacaaaattagccaggtgtggtggcgcatgcytgtaatcccagctactcgggaggctgaggcaggagaatcacttgaacccaggaggcggaggttgcagtgggccgagattgcgccattgcactccagcctgggcaacaagagcaaaactccgtttcaaaaaaaaaaaaaaaaaaaaaaaagttacttttcacatgcattttggttatgcgtgtgtaacattgttgcatttatgttacatcataaaatcctttacaaagtctctaaagctccctgttttttcttcatcttcatcttgtcagctctctcctgtaatctctaatcttctmcctttctgaaggcactgaggtctttcatgttttaggattttctctgtagtgtttttattaaataatatgttattcaaattagcaattgaatccaatttcttataaggtatgctacctaaraaagatatccggacgttgaaggaaaccaaattgagcatattggttgaaaatgcaagtatcatcccagttaagatatatttatcctgtgcaccccaactttttgacaccctgtattatccccagttyacaaatgaggaaacatatctgaggagcttgtccaaggtggggaaatagatatttacataaatagctgtggtasaaagtaatgggcactgtaacaggagattggataataratggctcctttgcgcgttgaggagggctgcctaactcttcttggkgttggagtcaggagagagggagaaggtagctggaagtgtgtcatgtaaggaaagcttcacagacattacatttgtgttgatcactcatgaatgaataagactttctcagtagccagggcagaaaagagagttctagacaggaaacagcatgtgcaagtgtaatgaaagaatattttgtatatttgaaactgcagctattttattttgaatcatagttattgtaaacaagtcacaagattagctagcaaagtagacaagatttaaattatgaagtcaatttctaaatcaatgtaaagagcttggaatttattttaatgatgggaattcaatgaagtgttttaagcaggggakttacattatcagatttttgttgtgaaaagrtaattctgacttcagctttgagcaagtaggatagggaccaatttattctcctgtgtgaaacaagccataaaacagataaaatacatgcaacagtggtcctcaagacatgggacttcaggtcctgaagtacagtgccctctgagtgatgagaaaccaacaagcgagtaccatgattgcctcagcttactgcctggmgagagtttctagggtttaaasagaagagatcaattaaaacttggcaaactcctgagttgggaagatggggccgagtgtctgggtaggctaaggcagctggagtctgcaggacatagtaccaggacagatagctatacagaaagagctctggagatctacagaggcttcctctctggttgatattcaagagagtgctgaccagcaaatgcatgtgaacaaactacccaaggctggggaaagaaccactcaaaaagactaaaggaaacaatctctggagcttgcacagggctgggaatattgcctgctcccaccagagaggaaagctccataattcataggccattcagtagagtacattcatagagtaattcatagggcattcagtagagtagaacaagggttttgcttcagaagtggggaaaaattgactttaggttaaaccctaagctgagtcctaactaaagaatcttaaaaacaaggcctaaagttatcaaaatgtttccaagaatcttaactgaatctcagaacaaaaagcaagaatatttatagggacacaaaaatatctagcacccccaaaataaaattaacaatatctggtatctaataaaaaattaccagatatagaaggaagcagaaaagttatactcatgagaaaaaaaaatcaacctattgaaactgactcagaattgacacagatgttagagttagcagacaagaacattaaaacaagtttttaaaaaattatttttattatttttttagagacaaggtcttgctctattgcccaggctggattgyagtggcgtagtcatagctaactacatcctcaaactcctgggctcaagtgatcctcctgcctcctgagtagctgggaccacaggcatgcaccactacaccaagctgatttttcaattttttgtagagatggggtctcactatcttgcccaggctggtcttgaactcttggtctcaagcagttcttctgcttgaggtttttaactgtacttctttatgtactgtgctcctttatgttttaaaaagtaagtagtgacatgcaaatatttaaaaacccagattggagctcttgagataaaaaactacactgtctgaggtgaaaattagagaagatgagttaatagccaacaagacattacagaagaaaaggttaatgaacttgaaaccatcacaataaaattatgtaaaaataagcagaatttaaaagagttctggcctcaaaatctgtgttgttgttgttgttgttgttgttttttcaggaaggaatagtttttttttaagttttaatttttgtgggcacatagtaggtgtatatatttatggagtacatgagatagtttttacaggcatataatgcataataatcacatcagggtaggtggggtatccatctcaagcatttattctttttttagtaattattcttacagtctgatatttgctaatattgattagttgataaagcatttggtttatgacccagcttttctgcgtgaggtacactgcgttgggcttttttataagatgatgttagtaaatgactgatggctgaattttttttttttttttaaagccatgcacaggtcacagctgtggctactagtttggtcatctaaaacaagggttgaatgcttataattgaacatatgtatacgtgcatgcaatttgaaaacagtgttctcttataattatcctttaagtattcgacttttctttttagatgactttggaactttgagtaaattttatattcataaaacaaacatccaatacctatttccactccacaaatctccaagtgacaaaccaaagagaaaatttacattggaaatttatgaggtctttgggttttactgaatacttatttaaagtccgtgtgtcactatactacactgacttagacttgtcacctgtttttggtgggaaaaagatttcatgttttaccatgacacacaaagcactactgttagatatattaaggaataaaacactttccttggttctaaattctaagaatttttaaaagtacagtgatagtctttagtattttgtgtacacggacttgcatacatgcctggttttcctccataatgggaaaaacttttgtaaataactaggaaaatattttacaaatcagtgtattcagttagaatagaaagaattttaaatttttaataaagaataaagactactatcttttttttttttgagacggaatcttgctctgtcgcccaggctggagtgcagtggtgtgatctcggctcactgcaagctctgcctcccaggttcacaccattctcctgcctcagcctcccaagtagctgggactacaggtgcccgccaccacgcccggctaattttttttgtatttttagtagagacggggtttcaccgtattagccaggatgttctcaatctcctgaccttgtgatccacccgcctctgcctcccaaagtgcaggtattacaggcgtgagccaccacgcctggcataaagactgttatcaaagaaactgtgcaatgggaagttttactccgttcaatgaatgctgattacatcttaaagttttcaggtttctattgtgttttgcctttcaattgagtttgaatatttgacgtttttgcccattaatatatgaacattttttggaaaagacttcagataattagtggaacatacattacataaaacatacaatatatatttccacgaaagtatttaatttaaaaaaaggtcaagcaagtatcaagtagatctgtttttggatcttctttgagtttggtctgaagtgtaagattttggatttagtgaaagcttctcagtcagtttcctagagggattgactacaccattgtctaataataattaaatcttccatattacacagtttagagagtatatttaatgagagaaaartgaattgctgttgaatagaaaatagacaaagctcatagaacatattttttcattctttgaataaattttcttgtattttctaattatttgattgtattagaatagatagtggatcgtgtttttttttttattacactatcatagcaaattgagaaggtactttctttctttctatttatttatttatttgagacggaatctagctctgtcatccaggctggaatgcagtgggcttgatctcggctcactgcaacctccacttctcccggttcaagcaattctctctgcctcagccccccgagtagctgggattacaggcgtgcaccaccaagcctggctaattttgtgttttttggtagagacgagggttcactatgttggtcaggctggtcttaaactcctgacctcaggtgatccaccggcctcggcctcccaaagtgctgggattacaggcatgagccaccgtgcctgaccggtactttcaatcagacagttttcactcatagctgtcttagcactgtaatatttggcagatcatttcttattcctatttacgtgaatgtccattttttaaacccattgtgtatctaccagcttgcaattactggcatccttggattgggagcaggggagtgcggtcagatttctatgtatttttttttttttctaattgtaaattttgaactatttacaagcaaaaactctccctcccctctttgttttagaaatataaaacaataaagttttttaagagatagaaaactgttgaacagagttgctttccttctgacatcaatattctcacagtagaaccattacatttttacactgagggctgatgtttagagagaaacctgttactttgcaattggtattcagatgagtggtgggggacacattttttcatttatcacattaagtttttggcagttttccactacttgcaagaagaagggagaaccacacaactacaaatgcctttgttgtctactgcctcggccaaatcacacactttgtggatgttcaataaatattgattgatgatgctattcactgaaaacactctcaggttaaaacttggagtgagtgcttaacattctcatccagctgtaattacgcttttgcaattttcatttagttctcagtactagtgtttacaaaactgtagcgttgtgaggaaactaaacaaagatatataaatagtgagtgagtaaataaagaaattccgaatgaactcaaacaaatactagacacaaatgtttcctgatacaatgcctagtaaacattataacataaatcatttatctttattagtttttcttcatgctgcacatttaaatatataaaaatatttccactgttacataaaacattttccttgggtgattcataaatcattgacaaaagttggcgttatgctaacacacagaattaggtgggttgcttttggctaaacacctcccctgtgcctccctgccatgtacacaaacacccttgaaacacgggaaatctgtttttattatatagtgctataacatggtaagaacggcattagactacccttagtaagtcagtgtactagtcccttgcaaactgtttaatgattattcagtgagtttcatttttcttatatcttaaaagaagagctaggttacttcatttctaatattaattccagattataaattctgtacatatttggtttatttttcttccaatgaagggttttggactatatctttatggaatcattattagaaggaaagtaagttttatgggaaaaataaaacagtaacaacagtagtcttctgtagtgtctaatccattagttacattttttactttttagctgggtgtcattttgtagttaaaggtttaatgactcttatttcttatttttaaaaattatttatttattttgagacaggatcttgctctgtcacccaggctgaagtacagtggttcaatctgtgctcactgcagcctcctcctctgggctcaagagattcttccacctctcagcttcctgagtagctgggactacaggtgtgtgccatcacacccagctaattgttttgtatttttgtagagacaaggttttgccatgttgctcagactggtcctgaacttataggctcaagggatccacctgcatcagcctcccaaagtgttgggattacaggcaggactataggcacgtaccattatacccagtgttattttattttttaatttttttaatcaagatgrgggtctcactatgttgcccagggtggtttcaaactcctgggctcaagcaagcctcctgccttggcatctcaaagtgttggtattatagatgtgagctatcacgcccacacttaatatcttttaaagacgcaaattcaggccaaatagtaacaactgtctttgttcttccagaccctactgtatttgagaaattggtgaaatattttctttccctctgaccttttttaattaccgtagtatatttgttgtaaaaaatttgtaaggagtaaaacttcctctttatcctaattctcaccatgtttagttatatatgtttcctttttcatctttcccatacacagcagtgggtcttttttctttttactgtaacttaaatgagaccatactgagtggttctcaacttaagttatacattggaatcacctggtaagtttcaaaaatacacagatgcctgggtctccccttgaaagattctgacttaattattgtggagtatgacctgagcatccgaattaaaaaaacaaacacaaaatttttaactccctgataattctattgtatggtcaagtttgagattcctaacaaagcttttagagtttgttttctttgttgaagattgatcatggccacccatctattatgactcaacgtatggtgcaccctcactgatagtcactcagatattttctagttttgccattacaaaaaaaatgctgcaacaaatgtacatgtgtctttgagttcctatataaatgatctttgagtagagttgtacaaggggaaatactggttcaaaaaatgtgggacgccgggtgtggtggctcaaacctgtaatcccagcactttgagaggccaaggcgggtggatcacttgaggtcaggagttcgagaccagcctggccaacatggtgaaccccatctctactaaaaatacaaaaattagctggttgtggtggtgcacacctgtaatcccagctactcgggaggctgaggcaggagaatcactcaaacctgggaggcggaggttgcggtgagccaagatcgtgccattgcattccagcctgggcaacaagagcaaaactccatctcaaaaaaaagaaaaaaaagtggggaaatattttatctaaatctcttacatatgcggttcttcattttggttttgtttgatttgggggcattatctatttctctttttcttaaagcttagggtcagaaatatagcataccagagttgaaaggaaacatatacagtaagtcctcacttaacattgttgataggttcttgaaaactatgaccttatgcgaaacctatgaagccaatttcaccatcggctaattgatataaacaagagttaagttcctatggcatatgtctggtcacaaacacatcacgaaacttctaaataaacacttctaatattaaacattgaaattaatgtgagctttatatacatttaagaaagattcataaaaacaagtaagacaattatttacccaacttttggtgaatccatgagtgatgatgctcctagtggtggtgggttaaatcaaggaataaatgtttgcaaagtgaaaattgtaagaagtgtcctttcccaccatgcaattcaaaagcaatcaattacaaacataggtgagtgcttttgtgctgcagtgtttattgtcgtgtatttgtatgattatagataaattattaattttctatttgatagtaatttttaatcattcatttgttcattttccaatgcacttattcaagttcagaattgcaggaggctggatcctaccctggcagctcagggtgcaaattggggacctgaccctgcagaatatgccgtcccatctcagggtacrctcacacatacttactcactgacactgggacactttagatacactgactcacctacagtgcacatgtttaggatgtgggaggaaaccaagtacccagaggaaacycatgcatacttggggagtatgcacacactccacaaagacagtggcctcggctggggattgattttttttttttttttcatcagtggtaaaacgaaatggggttgaaccaaatgatgttayctgaggacctgctgttaggttttcagcctacatttcccacctagtgtaaggaaactcttggtatggacactaccaatgactatccaccaagagggccttaaagacagtccctgatgctgggctattccaattgtcattttttcctacatcaggtttagaactacctgtttatagctttagagtactatattttgttgaccagaggagtcttagaaatcattttggttaaaatatttgttgtatagatgaagaaatgaggcccagaagctgtggatacactgtccaatatcaaacagctgaaaagtcataatgctgggtttggagaacaggactcattcttgacccactgtagcttattctgattacaaattgtagtagttagctttttctgactactaatactgtagtagttagctactgctgccaagtttaacaacttaaaacagcatttattatctcacagcttctgtgagtcaggaatatgggagtagcttaaccaggtagttcttgcttaggatctgttacgaggttgcagtcaagatgtcggccagagatgtggtcatctcaaggctaggctgggggaatattggcttgtaggctctgctacttggcttttggcaggactgataatacccgcttctaaccttattcacatggttgctggcagggattggtttttctcaccatgtggggctgtccacgggctgcctaagtgtccttagaacatgaaggttggcttatgccagagagaatgaagatggcgggagattgcacccaagagggaagtcatggtttttatataacttatagtgttattgttattgcatcacctctggcataatgttattgcattacctctggcataatctgtttgctggaagcagtcactaagtctagcccacagtcaaggggagtggaattatgctccatcttttgaggggaagagtatcagataatttgtgtacatatctttaaactactacacatatgtttaaatcgtatttagcatttggtaattgcaaaatttgtactttctgctcaaaggrcgttttatttcacttcctggccctgaaaggaagctagataatcattttatcataatcacacaactgaaataaacttctggaattaatagagcagaacagtgttttaaaggttgtctggctaataaacaggagataatattgggacccagaattataactcattaaatgtatcctcatgcccaatcatgagatgtgtttaattattaaatgattacatattaatatatgcatcatgtgatctctattgccatcaaataagctgctattattattattattattattattatcattattattattattttgagacaaactctctgttgcccatcctggagtgcaatggggcaatctcggctcactgcaacctccagctcccgggttcaaacaactctcctgcctcagcctcctgagtagatgggattacaggcacgcaccactatacccggttaattttcgtattttagtagagatggggtttcaccatgttggccaggctagtcttgaactcctgaccttgtgatccacccaccttggccttcctaagtgctgggattgtaggagtgagccaccatgcctggctcaaataacccattctttagagtgtcccataatggtccgtatttttagtgtcagatccatgatccctaaaatcttaatgcctaaattccagatgttttaaatctctaaactgtcagggtgttactgggaacataaggtaaatgccttgaaaccaaacaataatgtgtttttaatgaagaggcctttctgtattgctgaaatctgaatcaagagttttcctctcttgcaatagccttttcataccaccctttgtaatgaaacatatggctcacatcacagtaaaatatgtagagtaggaagaagaaaaagcatgtttcacatacgtgtcatatctgatgtaatgccatatgtacaacaaccatagaggactgagacttaactgcagtcctggaataattagagtgagagtgtccttaatttattttaaatactgcaaatggtttcacattttgaagtaattaacactcccttcacttataatatttgcatttcattattaagaaacaatccctcaataatttttaatgaactcttgaaactgatatttaaaaagcattaattttctgaaaataaattatcaagagaatagttcagtcttgtcttgaatttaccatatttagtaagctaatgagagagaatttttaaaaaggaaatacattttgtggctttttatgaagtgtgtatgactagctgtctttgtgctcatggtctcattttgatgtgggacatttttatttgatataagagaggggtaacttatgatcattctcttctagaaaacgaaaaacttttctcaaaaatagcaaaattccaaaagaagattgtgaccttttttttttttgttttagggaacatcactttctcttaggtgtgctatttctttcctgtttttcaaaacaaaaatgacatttgtagcaatgcattatagtgttatgttatactatatatgttatatataatgtatatatgttatattaatacataattattgcctttatttttttgagaccaagtctcactctgtcacccaggctggagtgcagtggcgtgatcttggctactgcaacctcctcctcctggatataagtggttctcatgcctcagcctcccaagtagctaggattacaggcatgagccaccatacccagctaatttttgtakatttttattagagatggggtttcgttatattggctaggctggtctcgaactcctggtttcaggygatccatccaactcggcctcccaaagtgctgggattacaggcatgagccactatccctggcctaccattatttatgactggagtcttatagtctgctctactgtctcaagctaacaaatgagaacagagagaaagagtgttttctttttgagatcttcagtagcttgaaaccatctttggcagagcatccaaaaagcttgatttttcagtggctactcctgctggaatctgggtttatatctgagccaggatcctgagcctacctgaatgctcaggttggttattaactacagagactcattggatagcctgaagaatggcctgggcatttcagtgtcacgctggaaggaggctccatcccatgctgggagatgagtaggcgatgcatgttccagttaccctctttcccaaggcattctgtgctttttctcaccgctgggaggcaagcttttgggggaagctgtgtactggctcacttatctatatagctatatctctgagtatcataaaaatttctccctgccataaagagagacgtttttcctatgggttaactggaacagaggaggtggagaaagtgcttttagtttcaagggtcagaagttaggagaaaacccataaatatttcttttcctgagcactcatcatgctgcagcaggccattaattttaaaagaggttttctattgaaggagcccgttcatctggtgacatgataggttagtttgtattgctttctctcctccgtgccagagagawgtgttagaaaaacaaattatttattttattatatgaaaatgcttgaaattgaattaaattaagaaaataataaaagatttattctcattatttattattatttgatttgtaaatctgtattctatcaacatagctgacttctgcatgctttaaatatttccatgaaggtgatatatgcagttttattgatatagtcctaacaataagggtgcttcttttatactgtcagtaggaaacaaaaccaaacaaattcccaaaagtcaatctcgttttgatgttcaaacttgatctctcttgcctccatgaaattagttatgatacagttctattgaatgcagaggaaaaattattgagaattatactaatatatttaatttagtggggaawgttttcctagaaagacagaacctttgtatatatatacacacacacatcccctaaactgctatagtatggacattaaaaaggttagacttagtcttcagtctcaatctccctactcacttttcccaccagtaggtatattttaatgtacctaaattgggcatctgagtttatttgaccctctgtgattcatgtgttaataatggtgccttagggaccttggtttatagctcaccagagaagctagggataagagactgtatccacatgtaggccactttgcaaatatatttaaaactaaaactgtaatctcatcttccttcttccactactgtggcagaatttagtgacctttaaaatgattttcttctgaggattcatctctttcccattttctttaatagaccctacatcttttcatttctcgtccttgaccatggttattattaacagtattattagatgtctataaaattatccatgtagatgagctttacagttagcgattagttatacgttcttaggattgtaactccttaggagacacatttgatgtattttagttctttctactaacctttgcagctccgctttctgtgctgcaaccctgggttttaaaatctcatgaaaaagcatctatcctccaattctaatttagcttgcttgctctctccatccatggtcattataaacagtaaccatattgtgtggtatgtcactttaggaaaaaaagcacacaaasaaatgttataattgtgaaaaagacagaagtctttcagttttgttagttataatatatgttatcactttatcaaattattctttatttaaccaccttttttcttctgctagagtgtcctagtctctttttatagctaccatgttaaaacttctattttctgtccccaccttacttgataattgcctttttgccttattaggatgcaaggacaaccacatttgcctctatttgtaaaatgtttttggcttatcttttagatcatttatatttaggcaaataaatgaaatcagcttctgtctttttaaatttttctacctgtagcttcatcccacagtcatctgctgacacatgagatgtaaaaagcttggtgtccttcttgccccaaattataaaccttttagtgaaaaaagggactaaagattaaatgattcattcatgaaatcatatattttaaaaatgttattcctattatgcagtaggcactagaaatagaagtggaactactcacatcttcactaatcccaaaattatttcagcaaggaaccatagtacaatttcctacctcaatttactttctactttacttgtacgagataaaaccttttgtttttttcttgtgggaagccagatctcctagaataakcactagaaaggccattgcattcttcagacccacagaaacatcaaagggagatatacattcccattaagaatcaaagtgatagctctgctagccagactaggcacctccataaaacatgcatacatccccccaccgccmcacacacacacacacacacacacacacagacagagagagggagcaagggagagagaaaatgcacactgagttctccatttccacattttgtaatgctgacattcaaaaaaattttgaggaaatagaaaatgagtaggtggggatattaatagctcagcaatgaaataacatacctgttatttttaactagaatagtgaattcataacaaagaattgtttaaaatagagattagcagcaaaagtaagtgaaataagaaaccaaacaaaactccaaacatgaatattgatctcacttatttttatctgtttagatactataataaggaaaaaagctgatgattgaaataaaattatttgtgtgtgtgtgtatctgtgtgtatttaaaattctgactaagcttcttcctttaaaaaggtgttaggctggccaggcgcggtggaggccgaagtgggtggatcacctgaggtcaggagtttgagaacagcctggccaatgtggtaaaacccggtctctaccaaaaacacaagaattagctgggcgttgtggcgcacgcctgtaatcccagctaccttagattccagctacaagcaccactgagtcccacatctgaggagattacaataatcttctcctgattagtagggagaagggacacagacaaactttgtcatggaatctttcaacaaacagtgtctggataggtcctgtcagttagaggatagtaaatcgaagcatacaaacaaacacgagtccaggaaataatgtttcagcacaagggaaagaatgcttgtctggagacctcggaagaagagaagaaccacttttctcaataggatttattataggaccaggagagaatttcaagtgaatgttttacttcctcagcagaaaggaagaagatatagtcttgatgaaagagcagaaagtcatgagcagcaggatggagtgaaaagaaaacatagtgaaatgagtaggaaaagaagattgatgaggacaaaaaaaaaaaaaaaagaaatgtaacaggaacaaaagatgccaacagcagattaaaatactgggagctagaacagagtaagattgacagtgtaaaaaatttgaaaaattattatgtaaagtcagtgtattgtcaggtctcacaggattcagaagaccagacaataccttgataaagatgagagagatgaaaacaagagagagcagagaacagaagctttaaaatattagttgcctcctccaagacacaatagagatcaaaattacaattaaataacattaggccgggcatggtggctcacacctgtaatctgagcactttgggaagccaaggcaggaagatcacttgaggccaggagttcaacatcagcctgatcaacatagtagaaccctatctctatgaaaataaaaaagttaaaccttatctctacaaaaaataaaaaagtaaggtggtacgtgtctgtcatcctagctacttgggaggcagaggcaggaggatcgcttgacctcaggagattgaggctgcagtgagccttgatcgtgtcactgtactccagcctgggtgacagagtgagatgctctctttctaaaaaaaaaaaaacccaaaaccaaagaacacctttgtgagcttaaaaaaatgaccctgttaggccaggtgcggtggctcacgcctgcaatcccagcactttgggaggctgaggcaggtggatcacgaggtcaggagatcgagaccatcctggctaacagggtgaaaccccgtctctattaaaaatacaaaaaattagccaagcgtggtggcacacgcctgtcatcgcgccattgcactctagcctgggtgacagagcgagactccatctcaaaaaaaaaaaaaaggttattttctaatatctcgttctttcctcctctcaaacaagaaatgtttgtcttgttgtagcatattgcgtagaattttaaatgagctccataaatattgacaattaagtcagaaattctttttaaaaaaacattttgtaaactgtaaagtatgagttcttagtcttttcttgcttctttgttacttctgtgtgacagcccaaaatttatgagcctttcattctagcatttctctaggctgttttatttttattctggaatgtggtgaggctttggatctataggtctgtaaactcatagctttttattttttaaaacaaaatgatatcaaatatcataccctaatttgtatataacataaggtatcagcttttcccatcctgaactcacagagttcagccctgatgccttaagggatctattgtatgtaatgagttaacttctttcctatgcatctagagtggtactacatttgtaccatctcaggagaattgaggagtcactcaaattatattctgtagggcatgattatcttgtggaaccgcagttgagaaaggctgactacattttgttttgtttttaatgataatggacagaagcttgtttcctcaaaatccttcctgcatctctgattttaatgtgcttttgtggctcactgattttgatgaggtaggctggaggcagccattatttcatttcacacagatggaagttgaagcacggagatgtcaggaattgtctccagagccttcttgaaataagataatgagaaagtggagaatgtaacacccattcagcccaaccaccagtctgcttctgtgagatccagatttcaaattataaaatgaatgtcatgtgttttatatagatagagatcccaaggaaatcagaaatgtctcatgccatacaggtcaaaattgggattatattttgatggcaaaggtttaatttgaataagttttttggaatgcagtatcatgagttgttattatctagttcaccaatatccacatgacagctcattgctatcagtatagttctaatctttttcctttaagacattcaatgtttttatgtatatatatatatgtatgtatatatatatgtatatatgtatgtatatatatatatatatatatgcagaatttatatatatgcagaattctaactccaactctatcactacttttcctgttgatagtttgagatttattgttccctgggatactcagccggtgttgaaggtctcccacaaattggctttactcacatcttaattccttcttacacccaaactgtatggtatatggtatttgtaaaatagccgatttattagtttctgataatgttttgaacatatcaacatctaaatcttatgctgattattgatacgctttttactcaaaattctacatattctcattcaaaccatgtatttgggtcttaacacatattatcgtgcttttctaattgttcacattccctatattttcagataagcaaatttattagaggcattgtccttgtttgacctttttttgtttgtctaacatgtattagcatgatctgagaaacagagagttgacaataaatatttattcatagattattattattttgagatggagtctcactctgttgcccacgctggagtgcactggcacgatcttggcttgttgcaacctctgcctcccaggttcaagtgagtctcctgcctcagcctcccgagtagctgggattacaggtgtccatcaccataccccgctaattttttgtatttttagtagagacagggtttcaccacgttggccaaggtggtcttgaactcctaacctcaagtgatctgcccacctcggcctcccaaggtgctgggattacatgcttgagccacagcgcctggcctggtttatagattctttggagccatatttcaactctttggctttatcactaaacaatttctttctaactacttaaatttttttttaattattttttccctattaatatttaaagaaagaaaatacatgcttctgaaaataggttattattttggggatttttacctcctttcacttgcctgtataagtaccttggaaattcctaagcatggactaggcttggtgattggaccttaattccctaacaacgttagaactccggagctttataaaacccactctcaaatagcccagtattgtttcctacaaaaagtaaacactgtagccaactgatacagctttaacatggataccacagtctcctttgatctgtgagttagaagaaattgcagatggatttgctgtattgttttttatgcatcttgcaaaataagattattccatgcatgttacatatatgtactttcacacaaatcttgcatgtttaacaatatttaaaaaaaatctttgtctttgtggaacttcagtctcccgggggtggggacaatgacaacaaaacctagcaaatctattatataatattaacatgttgagggtaacaaatgctataaaacagagcaaccagggaaactagaggcagagaaggggagtgatttggccaaggcatataagaaagtcagtgctgaagttggtctagaatctggttctttgactgtctckgttcctttgtttgcactacactgattctcttggccccaggggccttccctctacccatttggattctttcttcaagtttcattatcttttcctctaccagtatgaactaaaagtctgagatcatattktcctcttctacacacatactaatgtttatcattcagaccatttatttgggtcttaacacatattatcatgctttactaatattacatattgctgtattttcagataagcaaatttattagaggctagttactgaaatcagtctttagagtctcagtgctttgggctggtcatttactgttctcccttctgtatatgtttccaagacaatttgagttcaattctactttgtgtgtaactttgacttttattattcttagtgatcaatttagtttcttcaaaatgattagaaggtaactaagacaaactatgcattaataagctgtttctagaaaagctatattttctcagcagaaattttaaattttgattgctgtaaacaagtatttgattttatgaatatgccacaatttatttattcactctagtttggatgaatatgtaagttatttctaatttgtgctgctgttttttttttttttttgagacagagtttcactcttgttgcccaggctggagtgcagtggtgtgtcttgggctcactgcaacctctgcctgccaggttcaagtgattctcctgcctcagcctcctgagtagctgggattacaggcatgcaccgccatgctcggctaattttgtatttttagtagagacagggtttcaccatgttggccaggctggcctcgaactcctgacctcatgtgatccgyccacctyggcctcccaaagtgctgggattacaggcgtgagccaccgcacctggcctgtttgttttttttgttttttttttttttaataataacatctaagttattgttgagtataacctaatgaaactgctggttgatgtggtaggtatatgtttagcaaaacagtttttcaaaggagtttttaccagttggcactctaaccagcagtatatgagttttaatttgcactgcaaccttcccaacatgtactggtgtcgagtttctgattttaattattctggtgagtgtggagtggtttctcattttgatagtaatttgcatttctttaatggctaacattgttcagtcctttttcatatgttcagtgaccatctgggttatctcttttgtgaattgcctgtttaaggcttttatctccaccccatttccccaaaaggatagagaatacaatagaaatggatagcttcagggctgttgtggacatatttcttgcaaatatctttttccactctgtagattgccctttcttgataatatctttggatgaacagacattttaaattttaattaattgaaatttatcaatctttattgtcattaccttattttcaaaacatgctttgagaaaggctacaaagatattcttttgtgccattgtctataagatgtattatttatctttcacatctaggtctctaatatgttattttgtatatggtgtgaggtagagggtcagtgtatgtttttcttcatrcagatacccatttaacccatcaccactgattgaaaagattctttttccattgcaatacagggacatagctgtgtataaatcatctgagagtacatatgggtgggyctgtttctagacttctttttctgttccactattttgcttgtccttgagctaacacttcaccatcttaatttctgtggctttataataagtcttggtaactggtagtataaattctttaccatttgtttttctataagattgtcttggctattcttgtgtttttgcattttcttataaattataaaattagtttttctatttcacaagaatagtatgctgaagtttatattgggattacagtgaattcatagataaacttgggaaagattgacatcgttataagaatgagtcttttttttgagatggagtctcgctctgtcacccaggctggagtgcagtggtgcgatctcagctcactgcaccctctgcctcccgatttcaagtgattctcctgcttcagcctcctgactagctgggattacaggcatgtgccaccatgccaggctaatttttgtatttttagtagagaccgggtttctccacgttggcttggctggtcttgaactcctgacctcaggtgatccaacctcctcagcctcctaaagtgctgggattacaggcgtgagccaccatgcctggcctacaataatgagtcttttaagctgtgaacatactataatcatccatttatttaagtcttstttaatttattgatcatgctatctaattttctgcatagaaatcttgtgaacttttgttacatttttagtgttttatatttttgatgctgctataaatagcacatttaagaaatacctaattattctgaatacagttggtttcttatattgatcttgtatttagcagccttgcaaaattcatttatttatttcaatagttatcatgtctcctcactttttcacacattctagtaactagtcaagttgactagctcctgtttaaggagaggcacatacaacatgctgttagaaaccggccagaggagcacagacagattgttcaaaatatcattcctttaagaagcttgagtgaaaacttttctgcttttaaagtatcaaccctacttgaattgtgggatttatcccccggcagaacctgcttaaggaaaatagcatctaaaattatgctaactactacctgtcagtgtacttggtgaaatcagttgacatctcagatacatacgtcacttccattatawcaccagaaaggaacatcatgcttcatggttttagccagtggttaaggacattttaggacaattttgctgtccctgagctatgtggcagaaaatatttataatcggaaaaaggggccaagaggcacaaataagttctgatattctaaatcacagaataacgtaccttactttaaagatctgaaagctagtgattttattagttggttgctgccagaagaccaaattaatttagatgtaaccgtaagaagccaagttacctacctgagtatttaaagtagggtaaatgtactgaagaaaacatacacttatttatctttgttttatagtgcatgaggaaaatattaaacacttttgtattgtcagcttttgatgtataccaaaccatccctaaacttagtagcttaacccartacccacttaattatctcaattctctggatcagcagtttgagctgggctcaacttggtggttctgctgttggtggcccagcttagatgatcatgattggacttactcttgagtctgcaaccagctgtcaggtcttctggggaatgattggtctacagtgggtcagttagctagttcatctctgctccccatggtctttcatcctccaccaggctagtctgggctcgtttgtgtggtggtggtgttacaggaaaggggtcccgatccagaccccaagagagggttcttgagtctcgcacaagaaagaattgagggcgagtccatagagtaaagtgaaagcaagtttattaagaaaagtaaaggaatgaaagaatggctaactccatagacagagcagccctgagggctgctggttgcccatttttatggttatttcttgatgatatgctaaacaaggagtgggttattcatgcctcccctttttagaccatgtagggtaacttcctgatgttgccatggcatctgtaaactgccatggcactgttgaaagtgtagcagtgaggacgaccagaggtcactctcatggccatcttggttttggtgggttttagcaggcttctttactgcaagctgccttatcagcaagatctttatgacctgtatcttgtgcggayctcctatctcatcctgtgacttagaatgccctaaccgtctgagaatgcagcccagtaggtctcagcctcattttacccagccccttttcaagataaagttgctctggttcacacatctctgacagcggtggcaggggaccccaggtcagcaagtggaagggaccatgcagagcttcttcctgatgtttcttgggtttcttgaggytcagggtcagacgcacacaacgttgcttttgtcccattcttttggccaaggcatgtagaaaggtcaatccaggaagggaatagacttttctacttgagaagcagaataaggtggcattattgtgtgtgtcaggttctacaccctccatataacaaactgtctcgttttataatgcatttttaagacagagggttaaatactggtagtctcaaatctatttaggtaactaataagaaacactraggagttaaatgacttcatgttggggtgttaaaagccttgcttcaataatggaggaaatcctggagtgaagactaagggatgaaatgtaaaagataactaagactgaaaagctaatttggaaagatagccagcaattgactcacagcaggccttggcttctaaatcctgaaagaaagaatgtttgaattattggaagggccctgttttctaatagcctgaattccagtgtactattgggtattagtatcactgctaacattacagagtktaaaatgttcaaacaaaaaakgctttgatctacaaaacttcagaaacctaaaaatatttttttttcttttcttttttttttttaagtgagtgtagaaagcctttccggaatcacagattgaaaagtgtggccatagagatccgtaatgctgaccgtttctttgtacatgaaagcagattttttccatttgcgtttttcaggaacgcaaatgagaactaatgtcaggtactttactttttaagtaaaaattctaaagtgtgttaaactgctctatggaagagaaatgggagaaaaaaagtcatttgattttgtagggcaggttgctgtgtaggaacagagaagggcagctgaaaacattaaaaagcgacacattatttctgattgttttctgaattgggaagaggagactgccataggatcactgaaaagtgaaactggtgagccttttataaagggtcaaaagacttcacaatagagcttaatggctatgtccaagtaaatggattggaagtctctacagagacttgggaacagggagggcagtcgggggaggttgcattttttyagaccattggcacayagccactggagaagtcatctaaatataaatcagaccgtgtcactccatagcataaagccctccagtgtcttccactgcatttcagatgcaatccagtctctccactgttgcttacaggccctgtgcaacctgggcccactttattttcccagyctgcctggtatcattctctgctgggaatctctgggctccagccacaaccaagctcattcctgcatcccagcctctgccctgggcagtctgtgccttcacatgggaagcttttctgcatttcttcttgtcattcaggttcaggcttacatgccccacccttctctagggtcctttcctgtcaccctattctaaagtctcccctttcttttcccacataccagttatttttctacccctgttaacttgctgaattttctttcgagcacttaccaggtaccttaaaaaaaacttacttggccgggcatggtggctcatgcctgtaatcccagcactttcggtggccaaggtgggtggattacttgaggtcaggagtttgagaccagcctggccaacttggtaaaaccctgtcgctactaaaaatacaaaaattagccgggcgtggtggcccgcgcctgtagtcccagctacttgggaggctgaggcagaagaatcgcttgaacctgggagacagaggttgcagtgagctgagatcctgccaaggcactccagcctcggagatagaatgagactctgtctcaaaaaattacttgtatttttctatctcctagcaccagaatgtatcagtatcagggaacttgcttttttttttttgagacagagtctcatgctgttgcccaggctggagtgcagtggcgcgagcttggctcactgcaacctccgcctctgggttcaagcgattctcctgcctcagcttcccgaggagctgggactacaggcgaccgccaccacagctggctcattttttgtatttttaggagagatggggtttcaccatgttggccaggctggtcttgaactcctgacttcagatcatccaccctccttggcctcccaaagtgttgtgattacaggcgtaagccaccgcacccagccggaccttgctgtcttgtacgtttattataagtctcttgtccctatcaccttgcctggtattcagaaatattcatggaataaaagaatgaaggaattcatttttaaagcacaaacactgtttgtgtgtaaagttattctactttaatgtagatggtttacaatgataacatgaggacattgtctgaaaatcccaaacaacagtgtcttctctatgtgttataatatgtcttgttgacatcagctgtcacatagagattggtggacagactagtaaaatatgtcatttttgtctatggtcacttaaaatataggtttaaaaaaatccaaacttcacctggtcatggtggctcacgcctgtaatcccagcactttgggaggccaaggtgggtggatcgtttgaggccaggagtttgagaccagcctggccaatgtggtgaaaccccgtctctactaaaaacacaaaaattagctgggcatggtggtacctgcctgtaatcccagctgctcagggagatgagacacgagaatgtagaattgcttgaacccggaggcggaaattgctgggagctgagatggtgccactgcactccagcctgggcgacagagcgagactctgtctcaacacaaagaacaaaaacaaaaaatcccaactatatctagggcaatgggcccctaattatttatatggcctaggaaaagaattatagaacttctactttttttttcttatttttaaaatttctaattctgtgtttgaaaatgtatttagttcattagtagcatagtaaatgtatataatatataaatacatattttcacatgtgtgttgaaataagcactaaatttgtgtgatggagtgtatggaccaatctaaagtgcaagttagaaaatgatgaattttctttttttatgatggagttttgctcttattacccaggctggagtgcactggcgcaatcttggcttaccacaacccccgctcctgggttcaagcgattctcacacctcagcytcccgagkagctgggattacaggcatgcgccaccatgcctggctaatcttgtatttttagtagagatgggatttctccatgttggtcaggctggtcttgaactcctgacgtcaggtgatccgtctgccttggctgttcaaaatgttgggattacatgcataagccaccacgcctggccagtgatgaagatttatgcaatgaatagttttgaccctagtgacaattacgggaagaagtaagcgcattttctttttctttttctttttcttttttttttttttttttgcagttgcaggatttaatagagtgaaatagaatgaaaacagagctcccatacaaagggaggggacccaaagggggttgctgttgccggctsgaatgcctgggtttatatcctgatccttgtccctccygctgtgctctcaggcaatagatgattggctatttctttacctcctgtttttgcctaattagcattttagtgagctctctgattggttgggtgtgagctaagttgcaagccccrtgtttaaaggtggatgcagtcaccttcccagctaggcttagggattcttattccgcctaggaaatccagctagtyctgtctctcagtccccsctctcaacaggaaaacccaagtgctgttggggaggttggctgacraccgctctaactgcttcctgctgaattggggcatagtagttgttgtgcagttgagatttcctcaggaggggtgccttcaatgtcgttaacatcggagcatgggctagcaggccggtccaggggtccgcggtagatcttagtcatggactgcatctgtggctccatttgaagaaccatatatattacagcttcgattctggaagagacacacttaacaaggaggttaaagatacagggattgaaatgtatggcctgcagtgcaggggattacttctttggcacactttacaggccctgactatctgcttgatagttttgaaaaggcctggtctagtaaataataatttggccatctgatgggtgctatcaatgcctaagtgaaaggtttggtgaagggttttaagtaatttccattggttagctgcaggcaaaagtatttttccttcttcggtggctagccatcctgaggggaggaaactacgtcctcgtgaggtccttcattctatttcttcttctgagtactggggcttggtttcctggaagggattaccccatactaagtgtccttctgtaagcatttctaagggagggtcctgccttgtggctcttttggctttaatatctgcttggcggttcctttttatttccctttccttctttttctggtgacccctgcagtgtaagactgccacctctttaggtttctgtacagccaatagtaatatcctaatggcttcctgatgtttgataggtgtttcctcggaagttaggaattccctttctttccatattgttgtatgggaatggaggactaggtaagcatacttagagcctgtatatatatttatcctttttccttttcctaattctagtgcctgagtgagggctattagtgaagtaagcacattttctaaagtgtggctgttcaatttttttaaacaaggcaatataaatattcatgattaaacctatgatttaaaaatattaaaggaaacataataaaggaaagggtcagtctatattcagtttgtgatggaaacattgttaggtacaccacaaaagatagagaaattcttaaaaagatggcattttaatttggggcttgatcctgcaccagataacaattaggcattccctgcacttctcttccacccatccttgcacatctttgccagccacactcctggcttgcttcctgaacctattcctactcattttagaatgactactcctctactttgaaatataaatatctgggtttcaaaaggcctatgtgagacccatatccaacagataaattttgtttgtttgtttttagagatggggtcttgttatgttgcccaggctggtcttgaactcttgacctcaagtgatcctcctgcctcagcctctgaaagcactgggattacaggcatgaggcatcgtgcctgacccagcagagaagtttgatcgatgtttttattcaacattttcttttcttttagtttaatgggctgttcatttaagataacaattggtttctagaaagtttggtgttgagaaagttactacagctagtttgctagcaggcttttaatgactttaaactccctttttgatatccatattgtgtattttgtttcagtattttatagaagtacaataaaaatgacagtactttaaaaagtctttccagaggtctcaaatatattttctaaaggagtgagtattggaataatatttttttcgctgccactctgatacatcttggtatgggaaatgcatagtgcttttattgctgcaggaaattttcgtactttattatcaaatcactttgtaacgccaacttcttttgaaaaataaccattgtgtatcttcatttcttctttcaatatggccatgttgccctcagcaacttcgtaataaagtgcactcaggctgttgtctctccactragataaccagactgtataactctgtgaattcagaatctaacccgttcccaccttgtcayaattactcaacatatgtccttgctgacatttaaattttacagagaaaaaaaaaaaatcgattgggcatggtggctcatgcctgtaattccaccaccttgggaggccagtttgggaggattgttttgagtccaggagttcaagaccagtctgggcaacatagcaagaccccttcccaataaaaattgaaaaaccaaatgtggtggcacttgccagtaktcccggatactctgggggtagaggcgggaggatagcttgagcccaggatttycaggctgcagtgacctgtgattgtgccactgcactccagcctgggcgacagaacaagaccctatctaaaagagagagagagagagagagagagagagaaactccataaaatagaacttgatggtaatatgcaaaataggtataccttaaggtggtataaacatgtgtctgcatgttattcgttcaattacaaacgtgagaatttagaaaatctattactggttaatcatttttccttccaagcacgtctataaacttttactctaagatacacaggtacataataacaggtaccaagttaaagattgaccctttagaaaatttttgactcataggataaactttcatttgtgaattatttattggtctaggacagtgactgccaaataccttcattcagtgagattctttcatcctgccttcctataccccgcctttaaggttgccttcccctttcgtttatgcccattgtaatattgtctctttgctaattaaaggagggactttttctttatgttgatcactttggaattaatcatgacatcgcctcagctatctatttctgttgcagtaagtcagagatagtaaaagtagatacaccatgctatagaagaaagaaaattggttctaagccctcctctgagactactcacttgtgcattttgaggttattaattccattatgtccttgtacttcatgcattgtctgttaaatgagagggttgcccaaaatgatgttatttttttcttctgatttttatcagtctgtggtttcattgaaggagggagtagatgtgaagagggcactaacagtaaagatgagtgcaatataactgaatgaaatatatgtacagagtgagagaagtgaagagtgtattttggatatatatatggttaatatttgtcctctttacctttctttagattttatgtttctgtttggtttgatagtcatttatttagtttccccacacaacctattttctctactatgtaaattgttaatagtatcttagagagatgtgggaatagtcatgaggacaacgttgggattataatgttctgcctttaaaatttattttttatttcaataggtttttgaggaacagatggtgtttggttatgtgcataagttctctagcggtgatttctgagattttggtgcacccatcgcccaagcagtgtacactgcacccaatgtgtaatcttttatccctcaccctgctgccagcctttcccttgagtccccaaagtccattatatcatttttatgcctttgcatcctcatagcttagctcctccttatgagggagaacatgcaatgtttggttttccattcctgagctacttcacttagaataatagtctccaattccatctgtgttgctgcaaatgccattatttcattcctttttatggcttagtcatattccgtggtataagtatactgcattttctttatccactcgttgattgatgggcatttgggctggttccatatttttgcagttgcaaattgtgctgctgtatacatgcgtgtgcaagtatcttttcggataatgacttcttttcttctaggtagatacttagtagtgggattgctggatcaaatgatagatctactttcagttctttaaggaatcttcacaccgttttccatagcggttttactagtttacattcttgtcaacagtgtagaagtgttcccttttcaccacatctacaccaacatctattttttaaaatattttttcgattatgaccattgttgcaggaccgaggtggtattgcattgtggttttgatttgcatttctctgatcattagtgatcagggagcattttgtgagcgtttttccatatgcttgttggccatttgtatatcttttttgagaattgtctgttcatatccttagcccacttttggatgtgattttttttttcttgctgatttgagtttgagttctttgtagattctggatattagtcctatgtcgatgtatggattttgaagattttctcccactctgtaggttgtctgttaactctgttgatattattattattattattattattattattattgttattttttgctgtgcagaagcttttttagttgaattaagtcctatctatttaatgtttgtttttgttgcatttgctattgggttcttggtcatgaagtctttgcctaagccgatgtctagaagggtttttctgatgttatcttctagaattgttacggttttgggtcatagatataactctttgattcatcttcagtcgatttgtgtataaggtgagagaggtatgaagagaatattctttaattccactttccttagccatttatgacagcctttcaccgttccactattgatctctattgctagcagtgatatgagaaaacagtccttgaaactgagtatttctttcctgagactgttcccttagagaagagctaagctcccatcatgagacatgggaaccatatctattcactgactgacatcagtgcaatgtctgttccatttaacagcttcattcttttaattggtgacaatatttatgctgcctaagcctgtgaactaaacttttraggcaagccaactttggttctaacttaggacaaaaagggaaatttgggtgtcatccatattcccatgcccagaaattcaaatctgttttgagtttatgtatgaaaacacctaaaattggtgggtttagaaagcaatgtattagattatgtcttaaaagtccccccccccttttttttttaatttggaatttttcctctgtgccaatgagctgttctaggacagggtttcccacctttggcaytgctgacattctgaatgggataatttcttgttggggggcaggtagttgttctgtgtgttatagggtatttggcagtatctgtggcstctacccttaggtgccatgggtcacccttcttgcgctgtgasaacaaaaattgtctctaggcattccctgagggagagggcaaagtcacttttacagctggcccagagatttgatcaccctgaggatggagctaccaataaatattacacctgcgaggcgctaaattagttttctttgagctatcataatgaactatttaaaaaacaattaaaaggtccttcactttattcttaaaataatcctaaggaaaagagatcaatgtagattattccctttagagagtggtaaattctcctcaaagtgaatttttaaaattgcttttcatagtaaagaagtaaaatatgtattgccagacttttccgtactatgtattgatagggctaaaacaaataaaatagatacaataataaataaaacctattacccataacatttgaaaagtaaatgtattttacagatattttgcattcattaagaaaacctgttttgatttttaaagatgacaaaatcagttatattgatgtagaaatgatagtttcatatccatgtattcttgaaaaatgccaagacagatcatgtaaaatgttctcattataaaaatgataactatatgaggtaatgcatatgtcaattagctaaatttagtcattcctcaatgtatactatatatacttcaaacatcatgttgtgcataatatatacagttttatatatcaatttaaaataaaacaacaaatcatacattactattaggataagatcctattgtaatgtgtgcagtctgtcatcaaggaaattttaaagcttgactkacatattagtttattggtcataactaatgtcttatagcttgatgtatataggttattaaaagtgaaatatagggaataatatgaaattttggaacaggtgcataatcgcttcatgataaattaggcttatggtgatactcctagcatgaaaatgtcttgtctagacctcttaatcaagggcatattaattacttcttttgattggttgaacagaatatcctaataaattatttaacataaaaaaagaaatgcccggtcaggcgcggtggctcacgcctgtaatcccagcactttgggaggctgagatgggccactcacgacatcaggagtttgacaccagcctggccaatatagtgaaatcctgtctctactaaaaatacaacaattagcttggcatggtgatgtgtgcctgtagtcccagctactcaggaggctgaggcaggagaatcgcttgaacctgggaagtgggggttgggggttgcagtgagccgagatcacaccactgcactccagcttgggcaacagaatgagacttcatctcaaaaaaaaaaaaaaaaaaaaaaaaaaaaaaaaaaagaaatgcctgagattaaaataatagaatccatgttctgtttgagtggaaagtggctggattgcatatctatctacactttgcgagaaagatctgtttctcacttstacagtgtctttttggatgaaaggaacaaatattagagttccaacggcatgttgaatagacttgtattttaamcgtttcattgccagtttctactggcatcacataaaactagatagaagctatgacatgcagtaataactgaaagaaattttagattctttttctaaagctatccttcttttcaaatcagaattatagttctatttgtaggggaacaatagatacaaagggagatgaggtttttttttcctttctatctgttcatttctcacggcatacctcatttttttcttcccaaaggagaaagaaacaatcaaagttaataatgtcattttgccatccttgaaaataactaatatttatatgtgcttccaatgtaaagccacttgatatcttacagggatgcatcaataataatttggaaagtgaatcataaactatagaaaaagctcagaataatagctattgacttttttttctctgtgtattagagttaggcatataagggatcttttaagtgtctatattgataggaattgttttactcttcgggtattcttaaaattcagttgatttcttcaaagaatcattgtgtgcttatagtcccctggggtcttcatattaagtcatagcctaagccaaaaatgagatgattgaattatcactttgtgtttatatgtaatagctcttaaactacctcttgttgtttttcctaactgattgtcataaaaacatgtttagggcaaaacagaaaaatttggagtttttgatttgatgtgctgattatgtggagtataattttgaggtgttacaagtttcatacaaataatttcttatatttttaggtttgactattttattcagaggtgcttggtttgtggttgtttttcatagttttattaaattcaataaccttgttcaatggccccttttctcagtaatattttccgtaattgacattaaagcttttggtgccctgcatacatttaagaatgtgtttcccgtatccctcgctaatattaatcgaatgtggccattttataaaaactatacaactatacaaattatttcatgaggatgtttagaagtatgcttgtcctttatgtctatagaatgtggcagttctttgctgccagaagtagtgagaaatacaatgaagtatgaaacgccatctttaacataatttttcctttaatattaaaggaacattcgttaacactatttctacttggatattttccagttatatactcaaccacttattgatcttccctttgcattcttgatcagatgagattgggcgtgttcagggtagtttggtcatagactgatcttccctttacattctatgaaataatttaaaaaaaatgaaatcttttatttggcaggatgagggacatgggtgggttagtgtattagtctgctttcacactgttgataaagacatacctgagacactgggaagaaaaaaaggtttaatggacttacagttccacatggctggggacgcctcacaatcatggtggagggtgaaagtcacatctcacatggcagcagacaagagaaaagagcttgtgcccggaaactcccccttacgtaatcatcagatctcatgagacttattcactatcatgggaacagcacaggaaagccctgcccctataattcagttatctcccactgggtccctcccataacacatgagaattcaagatgagatttgggtggggacacagtcaaaccatatcagttagtgagtgatccaaagcttaaatgggtatcctcacataacacagtgaatctttagtgtctggttattgggaagccaaggactacgagaactcagaattctcacctcattgtttcagtctacacctccaaaaaacactgactttctgttcagtgctgtaaacctgtagttgtagtctgtgctgtccaatagggtagccactagccacatgtggctgtgtaaatttaaactgaactttaataagataaaaactttacttcctcagtcgcactagctacgtttaaagtggtcaattattagtcaatgcagataaaaaaacatttctatcctgaagaaagttatatctgtcagtactggaagattcttgttttataccacgttaaaatatttagatggctcccttctcttggaaaatccacaagtcagtgaaatgttgaaagtttgcttttgggttctcttctcttttcatgtacttgtgttgtagctggacactgagggcctagggaattcctggggtgccccctgaagcctctgtcaggtttgctgtaggctccaggcccctcccctccttcaggcttcagccagagcagccctgcttttgtctgttttacaaattggagagtcctagcagcacatcgtttgtacaaatrgatccttctcttaaataattagaagccacattcagctgatttacagaggcctggtttgggaggtagataaaaagaagtaatttggggacatactccttcccataccatcccccaacttaatgcatatcttttatgcatgtatgttcaggttaaatatcattatgatattgcttctgagatgtctagacttgagaggatgggtttgttatgatagaaaaatgaaaaatgttcagagataaacaatgatayctagttttaagtgacagcagtagtttttgtttttgtttttttaatgcttaattctttccttttctgttcccgttttcagagtaatgatttggttctctaactttctcctagagtaaccagtgaaatttttaaaattatgaactcatagattataatgtgatttgttgtagttctttgcagttattattctttttgtcactcagatttccctacatttagctgataggcacctcatcatcttggattttttttttttaatatagcctagtagttccgacaacttccttgcttctggtatggcaagatgttgactaattttctacatttcccatacaaagcctataatctgccattttctaagggactctaggccctagtttgtctttttttaaagaaaattttaatacagtatttagacacaaataacagtatagaaagctgaaaaaatagtacaaatccttcaacattcatattggtttgaatatgaatatacttattacagaaaagtgttacaatggtaagttgaagaaaaagagttggataggtgtcactttatgtgatcgcttgaaaccgtgatttgttaaggcttttaggcaagtgcgctctttgttgttccatttcaaattatattacatgcatcgtattgccctctgaactgttagtttctccaaccacccatgtacagatatacagaagctgatatacaattcagttaattggaawtcagcaaaattattgtttcataagatctttgtggtatgagaaataagaaaccggggagttataaattttttgaaattgtattttagattcatatacatggttgagttctatctgcatgtccctgctgatgaaagacagagagccgggtgcagtggctcacatctataatcccagcacgttgggaggccgaggcgagcggatcacaaggtcaggagttcaagatcagcctgaccaatatggtgaagccctgcctctactaaaaatagaaaaattagccaggcgtggtggcgcacacctgtaatcccagccactcaggaggctgaggcaggagaatcgcttgaactgaggaggcggaggtagcagagagctgagattgtgccactgcactccagcctgcttgacagagagtgagactctgtctcaagaaagaaggagcagaacatataaaaatcaaagggttggcttctgctgaggctattggacaaatgctggataatgtgtgatggaagtaaggtaaaacgtggtacttttaatatcackgaacctccttgctctttttttttttcagagtacttagcaagccttactatagattaatggaaactccttataatattcttttatcctgtttatttttggtttaattattttcttaagaatccatttccaatttttgtacctaaatttaaattccaccttactgataggcagctagcatttcccttttggcaatgttgctgtgtaataaacaagataaggaatggagattagctggaatgaacatttagaatacgtttcatcttcacacctctgacctcctttgggcacaacccatttaaggataaatatgtatgtttatacctgcattcgtttctagagtgctagatcctatcactgttgctagtccaggagtaacatttgaaggttcatttgaaaaaatttggtcttcttmtgcacttcagctgagtaggaggaaaagccaaatcacttcttccctgagtgagcattcataggtctccatctctgtgatcacacggagtcattatgtagcagttggctctgatacgcttgcacagacacaaattgagtccgacaggactgatgtctcctggactttgctgtcatttgaaatgctgrcatgaggatgggagcagtgaaagcgggaggaggggaatggggaggggagagctgattcctttagcacttttccaatgaacttttgagatttttaacatctgatagctgtgaactgcktgataagttgwttttcagaggngattgataacaatagctgatttggaacagctggccagcttctggattcaagaagttttccastgtaccacttgcttcttcatgccaacccactgtttaaaaaaaaaaaaaggagactatctaatagaatggtagagtgattcctctcctttttagttttatctttcctgcattcaaaccgcttatgaatastaataaaaaaggtaatatctttaaaacaatttttgttctcatgcttaagctgagtttcagaaatgacatactatggtatctgcattataattctttttaaagtacaagttattttagtggattaggttattgctggatatctctagtatttcctgtcaaaaattttgtatatgtttcaaatatttcagttttaaaaattaaaggtatgcagtttcattttgcaaatgaatactgatagtcattttcagatattttctgcagtaatagaggatgcagtaggatgtgatctactctctttatttttaaatttttcattaagagtgtactctgcataagaggctgtgctagatttattgagggttctataggtacaattatttaacacgtgaagaattatacttcaaatgattgcttggagccagtcattgcctcccttcctaattcccaccagtaccaccattactcttaagtcctgtgtcacttctcacctgaaactcttgctgtggcctaatagcattctctaaatcatccctgatccagttgtcagttaatctttccaaagcctggttccatggttcctctgctctaaaacattaaatggctctttttgtagtttgctgaataaaggccatttgacttagatcgccatccaaggctctctgtgacctatttttttttaaagtctgaatcttcttttttttttttttttttgagacgaagtctcacttgtcacccagactggagtgcagtggcaggaccttggctcaccaaaacctctgtctcctgggttcaagtgattctcctgcctcagcgtcccgagtagctgggattacaggtatgcaccaccacrcctggctaatttttttgtgtttttagtagagacggagtttcaccatgttggccaggctggtcttgaactcctggcctcaagtgatcctcctgcctcggcttccsaaagtggtggaattacaggcgtaagccactgcgcctgactctgaaccattttcttttgcttcatcttctggttttcctaatagaagatggtttcccatgacttcaaccagaaggttctcaaagtgtggtctctggactggcagcatcagcatcacccaggaacatgtagaaatgcaaatttatgcaaatatgtgacccagtcctgtaatcctagcactttggtaggccaagagtggtggctcatccctgtaatcctagcactttgggaggctgaggcaggcagatcacttgatgccaggagtttgagaccagcttggytaacatggtgaaaccttgcctctactaaaagtacaaaaattacccaggcatggtggtgggcacctgtaatctcagctacttgggtggctgagacaggagaaccacttgaaccygggaagcagcgtttgcagtgagccgtgattgtaccactgcactacagcctgggtgacagagtgagactgtctmaaaaaaaaaaacaraaaaaaaaaaacaaaaaaaaaccaaattattgaattattggatccccaccacagacctactgacccaygaactctgatggtagtactcacgcatctgttctaagaaggcttccagggggccccgtgcatgctgacctttgggaggccctattccaaccaaaccaggaaactcaggttttccaaagttcctttcccactgccctgcctttgcatagaattcctggaatgccttttcgtcatcttgttaaaatcctggttaaacttcaaggcctagtttgagacactatttccatgatgtcagtcttgatcctatcttttatagcattatctggttttccttcctggcgctaatcacttattaaattgtactaatcatctggtgtacctgctttattttccctactaatctggaaacaaaaataatagaacctgactcatctttctgccttgagacaccttgtgctgtcactcttgatgccttgcacacagtaggtgctctaaaaatagtttgtggctttttgattttacagagaagactgaggaaattaaacccttgcccaggaggcatataaaaatcctgttaaatgaaagaggctcatgctaactattgttttgacttattgatgccaaactagacttgaacattgatgtgtcttcagggaagaagccaaatatgctagtgtaaaaaattctaacctctgctatttacctggagaagttgaattagccctgtcatttcaactgatgccaaaaaagcagcttccattattgtgtcagtaatagacttttatcctgcatggaggaacttctcttaaatctttctcatagcactggtgtgcttctttgcactgatgtatttacgtaatgtttcataagaagtgacagttccttttttaggtctttgcccaaaaggtggcataagcaaagaatgaaagtcaaggtggttggctttaggagagcctaaaattgggaatgcgagagctcccacgtaacacaaacccggatagtctaagactcctacattttacaaaccaagttatttccttcctaatacaaacaaagtatgacagttacaatttattgtgtatttacaatggattgtgtctgtcatggtgattgtgmtggaaccaggggggaaagagtaagaaatctaagcacttttgtgttttcttccttttcttttctcttcctccccgctttcaggctctgaaagtgttccagctgaaatttcagatcggacagactcgctgcggctccggaggcagtgattccaagctgctygcgcacgctgctgccaagctgcaggatggtgcacgtagccaggctgctgctgctgctcctcactttcttcctccgcacggatgctgagagtaagccattctccccttctctagggggctgtgaccataatgagtggttttgtttgcagttggcaccaggctcagggcctctgaatacatttcctttggaagtaaatcctgagacactgcgggatcctccttggctaccagccagcctttgaaagagattattgacgtgacttcctcaccatttcctctccgttttaatgccccttttcttgtgcatctaactgctcctcctgtttatttatttttttatacctcttatcagcctggtagcaaagatattatgagaccaaggatataactcaaactgaggttaaccagttggtggtgccaataagtaaacattgttcagacccactcaaaatttctttatttttgtggatcwttccgtgtttagaaaaatgcacaatgtcacaatgagcctaattaaacttccaagccccttgtagctgtcatagcagctgttctaatgtactgtttccgacagctgtcgtcgagtacagtattgaaacaaatcaagcagaactgacaactttgtggctggatgaagggtctggaagtatgaggagaattctgtggactagagacaccaaagcttggattactggactcaatttatgaaactgctattgtggtccattaacttgacaattaatgagaagatcacatcttcctaattaggaaatcattaggtctaccttgtttacctgcatttattttcccatctgtcctgtggctttttggaagagatagtattggagaaaggcatgtctcggccttgtactccctgacatgtgtggttccttggtagtggtttagttcatacatgagttagccattttctttgggaatcacctagtatgagtaaaatgtgtgacatctgcagtcattaacatttctctccactatttcagtgagattaaatttgactcatgttaaggatgtttccaagacaagtatcctgtgtcatcttggcccctttctattaattgcattttgacaggaattccctcacgagccaccaattgcttcatggaaataggagctctattttctaaagaggtattttgagaagtgaaaggaataacattaataagaagatacatatgtaatatgcatgttttaagcacaacattctctggttaataatgtatatagtttcctaattagcacttgggagtgtcaacttaaggtgaagccaaggaatttcgagtctaatgccagcaaataattaactgggaaaagacccaaatgttagatgttcttgttattttaaagccatttatgtcaaagcttattttaaaggtgtaatctaaatttagtttattaaagagaaattgagactatggttttattatttttgtttggctagagtgcaaaagtaagttgtttcaccattgttaatttttggcaaaagcccatttagaccctgggagcccagtttaatgtcagatcacagctagagtttttcttaaagttactagatataattattgtacgtccatgaagttatatttccagataactaaaaatgttcttctactgaggagtgatgcctttgcttaattctctggtgaaaagtggcagacagatgtggagtttagaaaggaagacttttaaaattgtgtttgaaaaaacaatcttttctgcagataaccgtcatcttactggttttctcctccatcttcctctcgttcttcttcatcacacttcttatgctgtgtagtcttacaaaagaaatcacaaaggcccttgttagcaatttttagttaagatatttatcatgctgtatgttttgtgataccagctttcaaccttaagatgtcccttgaaaaagaatctactccctctcactcctcccattatagctaaaaagaggaagcaggcttcaacttggccaaatcaattttgattagctttgtccttgtctaatcagcctccatgtagtatattttccttttcacagattcatttggcactcttgaatagcatgtgtattctgaaagttattgacgaaagaggaaaatttaaccatatcttttaaggtacattttaaaagaagaagggacatccatttgcaatctaccagaagatacctgtggtttgtgaaagcacatggtagagtcggagatatcattttagtcactaaaaatgtttaaaaacaattggtaaaataggatccagattataacttatcaaatactgtcattaccttttcttcaaacactgaaataaaaataaagttataagtaacactacagaaaaatttgatttattcactatcatatataaagataatatttttcaggcttttattgcctgggtcactgatttgttttcttatgccttcattagcacatctagccttctttgttttcccttttacctaactgtgtttcgtattgatccaaaggatcaagagttattaatagtagcttgtcagagtcattttagaactctgaaataattttttcaaatgtttgtcctcctttgaaaaagaagaccatatggggatgggaatggaaagaaaccactctagtttgccatgttaatttaatgtgtccaactcactctcttttgaaatgattaactccaaaaagcctgagagtcagggttataatctgctgtatagaatgtcatagcaaagtactgggtgtgatgttgcattaaggaggagggctcttataagcyttggttcaaacctaggttggaaaattgtgataatatccctcagcagaaaattatagtctttgccattgccagtttaaaatgccttgtatatccactattatttgaaaaagctagacgtgtgtttgtatctgatttctgttcattccggtgtcttgaatggcccagatgattttgcttgttgtttcttgaatgcatgtctggacagtagagctgtgatctcagggaagggcatatgcgacttctgttcgagcagcatgagtaagctcttcttcagggctggccaaccagttttgtggtttaggtagtgctccgagaaccattcggctgtaagatgcatgcagattaaagattcatatagattatagtaatgtaatcctcaggtgaatgtttttcttctggatgagttttcataatagcttctgttagttgtatttcatacataaatttcgtttgctatttaccagtctttaaaaaagaaaaactaaatgcagaccaagaacctactgttagcatcttctttgtcagaccagtttcactctaacgaaatcacttgtagcatactgttacattctagacctgagtttacactgtggtcattataattaaacctgaatgtttacctgatctcagaaatagaacattttttttaaattgtagagacacactcttcataatttaattcctcagatggtttagttcatccatttacttgttgctttttgtcatttttccacttcagattgtgaatacttcttcattctccttccttattgttaaagagccttgctgtagtcactatatactcgcaatatttctttctttttttttctttttttgagacagagtctcgctcagtcgcctaggctggagtgcagtggcgcgatctcggctcagtgcaagctccgcctcctgggttcacgccattctcctgtctcagcctccggagtagctgggactacaggtgcccgccacctcgcccggctaattttctgtatatttagtagagacggggtttcactgtgttagccaggatggtcttgatctcctcacctcgtgatccacccatcttggcctcccaaagtgctgggattacaggcrtgagccaccacgcccggcctatactcacaatatttctgtcttttatggaagcagtgagtccctcctcaaacccctttggtattatatcactgtagaccatggagtttctttatttctttgacattagagcatagactgacatctgtgttgtaagataatcatttgctatcttaagtatttcctgatgggcagcatagagtagtggttaagaatgtgagctctgaagccatagtctggttttgaagtctggctgtgatttggtaaatcatgctyttagcctcagtttcccatatctttgtcattttgatcaatcttgctctttgcttcagttttcctatttttaaaatgtggatgacrgtgatggtcatgatataatactcctgggttttgcgaggatttgctgaattaaaagaaaactcatagattagcagataacacaaggtaggtgtttcgtgaatgttagctgttattatatcattattcaacaagatttagcaaacagttttattgagcacgtgtgaagcactgtgctaatttttttttttaatttgacctagaggttatcaaaatttgggtggtggataagccaggttttcttgtagcaagttaaagtctccagcttgcttctctgcaaagtcctatatgtaggagttcttataaacccttgcttccgggcattaaattgaagatcaagaggggaaatatgaagcatatctactttagtctaaagtggttaaaaaaaggcttcttagaattacacatttaaaattaatttggcttgggtagaatggatagtagaaggcgtttcctctgtttgtacggttgcctcttacatacattttattgagcagctcacaggaaggaactatagaaatttactgtaggtaaacacagtaatacagtgcctcttcagaaagctgaaggtagggggtgagcttggtgagaaagagagtgagtggccattgatatgaccaggaattatcttgcaggaaaaaaatacattttttagtttttttgagacagtctcactctgttgcccaggctggagtgcagtggtgtgatcttggctcactgcaacctccacctctggggttccagcaatcctcttgcctcagcctcccgagtagctgggattacaggcccctgccaccatgcccggctaatttttgtgtttttaataaatacggggtttcaccatgttggccaggctggtctcgaacttcgaacctcaaatcatccacttgcctcagcctcctaaagtgctggtattacaggtgtgagccgccgtgccagccaaaaacatttttttaaaggaataggaaaatgatgatgttgaaagcagggcaaatgattgcatcttgcagaaattggcgagatcttcccaaaaaagttaggaaaggaaaggataactttcttatattattaaaatgcatacatttcagtaggcagagtcagtttacaccagaaacatatcttattaaaaagattttggtttttgccatgtgtggtggctcacgcctgtaattccagcacattgggagactgaggcaggaggatcwtttgaggacaggagttcaagatcagcctggacaacatagcaagacctcatctgcacaaaaattcttagaaagtaaaataaaaatgtctttttgtttttgttttagattatgagtgttatctctatcatttaagtatcctttaaaagataaattgcttgggatgatgaaaatgttcttttttttcgagatggagttttgctcttgttacccaggctggggtgcaatggcacgatcttggctcatcgcaacctccgcctcctsggttcaagcgattctcctgcgtcagcctcyctagtagctgggattacaggcgtgtgccaccacacctggctaatttttttgtgtttttagtagagacagggtttctccatattggtcaggctggtctcgaactcccgacctcaggtgatccgcccgccgtggcctcccaaattgctgggattacaggcatgagccactgcgcctggcctcaaaaatgttcttaagttagattagagtgttggtactgagtataaacataatatactaaataccattgaattgtatactttaaatgggagaactttatggtatttgaattatatctcactaaagctgttaaaacaaggaaaaaaaacagccagttgtggtggcacatatctgtagtcctagctacttgggaggttgaagagggaggattgcttgagcccagtttaaggccatagtgacctaggatgacatcactgcactgcagccgtgtgacagagagagactctgtctcaaaacaaacaaacaaacaaacaaacaaacaaaaaacacctaaaccaaaacaaaaagcaatttctgcttaccctagttctttggttagagtccctttagtatatgcaatctgaaagtaacctgtatgtttacatgataaacacgtagccatgtttatcagccttcattgtttctcttttctctaaattagtagaggtgtggcaaaattactccctcttccttcctcccctcactttaaagtagctaaattagcagcatccagctgtctgaagcaaggaaagtattccagctattttactgatcctttagcctcattgtggagtttctgtggctttttgaattaattgctcccagcagagctgtagctacctagtaagattaagactctgtcacaaaatcaacacgtgtacatttcaaagcattttttattgagtatagtaggacttgcttttttaaacaattccaaagtgtgacctgtttgttatctctatttgggaataggccctaaactctaaggatggaacaattatcaacagtatttgtgaactaattcttattatttgtaatagtctggtggtatttgattctrctgttgtgtgatctcctggttttattcccttaacattcttaacttctttaattttcctctcattctgtttctatgtacctgatctacttctttttcttttccctttcttttttgagacagggtctggctctgctgcccaggctggagtagtgcagtggcacagtctccgctcactgcaacctccacttcctgggctcaagtcatcctctcacctcagcctccctagtagctggaactacaggcacgcgccaccatgcttagctaatcttttttttttttttttcttgagatggagtctcactctgtcaccgaggctggagtgcagtggcaccatgttggctcactgcaaactccatctcctgggttcaagcaattctcctgccttagcctcccaagtagctgggattacaggtgcccaccaccacacctggctgtcatatatatatatatatatatatatatatatatatatatatatatatatatatatatatatatttttttttttttttttttttagtagagaccgagtttctccatgttggccaggctggtctcgaactcctgacttcaggggatccacctgcctcagcctcccaaagtgctggaattataggcgttagccaccacacccggccttcttggctaatttttatatttttttgtagagatggktttaccatcttgcccaggctggtctcgaactcctgagctcaagtgatctgccagccttggcttcccaaartgctgggattatagtcgtgagccaccacacccagctgtacctgacccatttcaagtaaccttgacttggttgggagccccatcccctcctgcctacgtagatgtgtttcttgttaattcagaaactccaagccagcctctatcatgaagtgaakaattaaagagaaaggtcctgtgattggatggagatrccattttagaaccaattctttaacctaaaatttagtatattcttttttcttcagtttgctttagcttcacttatttcttcactaaactgtgtgtgtgtgtgtgtgtgtgtgtgtgtgtgtgtgtgtctgtctgtctgtctgtctgctatgtggaaagctctgtgtgaagtggtgggaatataaaaattttaaacagtgtgggcctacaccagcctgtaatctatcttcagaattcatagctagtgtttaggatgctctcaagcaatcttctcagactttgtctctcggcagtaagtaatgcataaagaatgtggaccctggagcagagtgcttgtgttcaagtcctgcttctgctgtataattactctgaccacagacagggtacaaatctctatgtgtctctcatctgtaaaatgaagataaatatagcacacacttgatacagttatcacaaggactaaggaaataactgtttgtaaagcattttgaataataggattaaatattcactaaatgttgttagttgctattatgcctttttttctcattagtttgtgtcatttccaaattagaagcatctttgtttagatctctgttggcatatattatcccattaacttcacaatttgagcagaatctttttaaaatgtaaatatgtatatttatatacatttatgatttcaagggacattgactgattggctcattcatgtctttcacagtcccattaataaatgtttattggacacatttcccgtgccaagcattgagttaactactgaggataaaatgtggattaaaagcaatatgatccctgcccctaaaaagcttaaactctagtggcatagccaaatatttaacattaatttttaaaatttacattttctracagtaacaagcattaaagggaagaaaataagcagccaagtggctcatctgttctgaaaagtaatccacagctttcctgagggagtgatttattttttctattttgaaataattttacacttaaaagacattacaacaatcatacaggaattttccatgtagctttcattcagttttcctaatattaatatattacataatgacagtacattatcaaaaccaggaagttaacatttgcacagtactgttaactaaactacatgtgttatttagattttaccagtttttacatgcacttatttttagctattattattatttattttggacacagggtctcactctgttatccaggctggagtgcagtgacgcgatctcggctcactgcaccttctgcctcctgggctcgggtgatcctcccacttcagcatcactagtagctgggattactggcacgtgccgtcacgtccggctaatttttgtattttttttttttagagatggggtttcctcatgttgcccaggctggtctcagaatcctgggctcaagctctccacccaccttggcctcccgacgtgctgagattacagacatgataaaaataaatgagcctggctaagtggtggagactgggtaagacaaggctccataaaccttgttcaaaatcttggtttttattctatgaactgcaggaatcactgacttatttttaagctgctataggaagacatttacaactttaaaagagcaatgaggcagcatggtggaaaaattctttggagggaggccagccagagtggccttgagatctgttaagaggctagttggaagttacggagtagatgtggtacaagggaccagggtgatagaggtttaaggaggctagactgcttgacacttaaacattttttaaaattgacctttgtgaagaagcattattctaaaactgaaccaccaacagattgttaaaatttagagtgaaggagaaaaccatgttaaraagggacctaaagtgtattcagtaccttataagtaatcctttgtttttaacatggcatttaaaaaattccccccaaatttatctttactcagtcttgtaatttcactttttaatcatgaagttcagatagttttatctaaacttatctttttgttaatatctgttaaaaatgtggaatccagaatcagtttaaaacaatgaagttcagtgccttactacaaaagacattacaatttagctttgttctctcataaaagttttaaattcactgtacaatttgcaataggttttcaaaaatcaacatagtactgtggcagttatttacagtaactacagttattaaatgtggctttaagatacactaagtacttaaatcgtcagtttaaaaaatagcacacaatctattccttttaasctaaaaatacggaaagtataacaaatctactaaaccaagtatgttttcttagtttttttgtgtgtaaagataaatatatagagaaacatatacttaaacctttttaagatgcttataaaggagtgagagaaaaataaaatgccattgtttgtcactaaaagtcatttaaacctttaatctacagtgattttaggttgatagaaactcctctaatatctatacttatcttttaaaacaaatttcagtaacatttcatttaaaagtaataatacttttcattcagcgcatgactacagtgtgcctccaataagccagatccagattcctgttaccacagactttatattctagttgggatgttgtggagaaaggagcagtgcagcaagacatggctatgggcaacaagtcactgaacggcgtgactttggagagtgataaatgctgcaaagatcgtaaaacagcatgatgtaatatgagagtaagagaggatatgaagggagaggataggtcttggtttggtttgtcatatgtcaaggaaggtgttactgagtgagatacaacacttgagccgaagaatgggaagggtccagctatgaaaaaatggagttcagagcatccaggcagatgggggaatgagtgtaaagaccttagtgcaaggagggagcctagtgtgttcaaaggacaaaataaggtccaggagacacatcatggggccctggaggtcgtataaagggttcggattgctgggctaggtataggagagtatgtagggaaacacatatattattgggacatctatttattaaacttgaattaggtactactgttctctactaggacaaaatgtgtatatatttttccacaaatagtgcattgaaggtttgatacaacctcctgatcaagttataaactcactgtctaaacagcttaactgaaattttctttgcaccagccgatatagacttgcaacaccaaagactttggtaaataaaagcacaaatgtctgcttttagctcgttatctctggtcagttttatttttcttttaaagcagatgatagttttacattggaaacatgcaattaagtctacactttccttcatcaatatccatagctgcagatagtgaaggacggtacatttgtaaagtaaggctgttattggagggtgatggtcaacatagaattgcagggaagaaaggaacttcaatagggmttttccctatatgcttccattttgtcaaaattacagcaataggattcctaagtgatttgttgaagtccctatatagattaaagctttttaataaaatatttcctggtaaacttcttccatttaagaaaaaaaaaamccctttattgtttatatgatttaacatatttggatttattttaagaccaatgggaatgtaaggtaatacataaaatgattattamaccataacttaaatgttttctctaaaatagtacatggtgttagtaaccagatttgccttaaataatggctcccttgcctaccaggagcaattttctcaattctcctgggaggataattgagaataggtaggagaattctgaccctttggcaatgctcacagctctcacaggctcctgtgaagtttaaatgagatcctgaatgtgaagtcctgtgaggttcagttttcattctgttctttctctctgtmcacacacacacacacacacacacacacacacacacacacacagagtaatacttaatgtatggagaaatcagctatttaacatttttgacctattgagatgatttttcttatcaaggaattctactcaggaagcagcttacagtccagttgtgacaacccagtggtctctcaacattgagaactgtcccctgaggggggcaaaatcacccaattgagaaccacygatgttgcttgtgaaagctttggaacagaaggttggagcagaggttaggagagatagataatgcccttctaattaatatggggtttggaagggagaaattttgttagaaatatgatagacctttcacaagctcttgaaatcagctgtgcgaattgggaaagagaaatcgtagttctgtgtaatatctgtaaaaccagaagcagattgccttatcactttatgtctcagtttttgttgtctggagtattagatgataattataggattgctgtaaagacaaaagcaggttaagcaatgtaaggtgtttagtactatgccttgcacatagtaaatgctaaataaacattagccattattataaactattttatggtatattaattttgttaatattttatttttatcaataaaattaattttatcttaattaattaccacagtgattgtgatacctttcacttgaatacttgaataatgatttaaacactttatctttcttttttttttttttttgaaatggagtctcactcagtcgtccagactggagtgcagtggtgtgatctcggctcactgcaacctctgactccyaggttcaagcgattcttgtgcctcagcctctcgagtagctaggattacaggcatgtgccaccatgcctgactaatttttgcattattagtagggatggggtttttgccatgttgggcaggctagtctcgaactcctgacctcagatgatccccctgcctcggcttcccaaagtgttgggataacaggtgtgagccactacgcccagccagtttaaacactttatcttcttaatctcatttgttcctgaatattctaagtgtaggcaacataatttttatcctcctcacttctcagattaaaaaaaaaaaaaaaaatccaagggtcagagtagatgacctgcctagagcaaaaaggtgaataggtgatggggaaggacctaaaacacacactcatgattccctgtccagagaagaggcagaacagctgaaaagagcaggcaagagagctcaaaatgcacagcagccagagggcccaagagatgccagtgggcatcaggtccagagttatccaggttcattgtagttactatgcccctcattgatagtcatcttcaggccctagagtcatggaggaaagttatgtcacagtcacagcttacacactgtgtaagaattgagaagcactgagtggcttttagaatggcttctaatttcaattaaaaaaaaacacatcaatttggaaatttttgatttctgtgtgactagtgtttcactataaaatgatttccattcttttattaggctttcttgttcttatttgtcaatttgattataaattgtcagcagtaaggtctgctttcaagattttgtcattgtgatcatgttgtcactttttactcatcatcatggtgtggtaaattggaaatcatggccaaaatattttacagttcctctcatcaaggtgcagtccgtttccccactccttgaatgtgggttagtcccctgactggctttgatcagtaataggagggtgcagaagtggtagtacaccagctctgggcctggcccttcagcagcctggaagcttctactttcactctctgacatattgagtcatcatagcaagatgctcaactgccctgctgaagggaccccacagagagggagaaatactcagccagcccacacctgttgcagctgtcccaggtgaggagctagatataagagccaagccatcttggcattccagccagagtccagcctcttcttcatgactataagccatatgagtgaccacatgggaggtggagtttaaaatcttctagctgaggcctggagggaagaatcatgtgcaaagaaatctttgccttaagccatttttgaaggggtttttaacacagcaataaatagctgaaacacatggtgattactgttatcaaaatgaagcatctaccagcttgaggaacaatcttagacctgcagtttcctctggaactgtaacacagatggtattctagataacacacttttaaatgcaaggttttttttttttctttttcttttttttagagtaaatgaacacattgatatacattagctaaagccctacttggcgctaacattttaaaagccttatacattttgcatgccttttgaccagaggtcagcaaatgttttctgtaaagagctatatggtaaatattgttggctttgtgggtctctatcacagctattcaactctgccactgtaacaagaaagtagccacagccaatacaaaataaatgggtaaaacagtattccaataaaactttatttaaaaatacgtgcagtgggccagattgttcaagagtcctagtttgatcacycctgcttttgaccttactcacctgcaactcctcatcagacaggagaaagtggagaatatcagcaaaggaccttgtttaacctgatgaagttagttaaagggaagagattagtttgattagcctcctttatcactttgctttgttagtaatgtttattgggagcagattaattagaagaaatawgttcaaggagcacatctcttgataaacatagatgtctaatggcrcttaacctttaaaatgtatgcagaaaaagctttgcatgttattgctcttcatgtcttttgggggtgcttcaggtattcagctgttagtgccatttcaaattgcaaactcctgaaaaatgaataatttatcagctgagggatagttttcattgcacggtgtgcctgacatttggagctatgaacatcttaaaaaagaggaaaaaagtgctggaaagtattacatttgcttggaaagttgtaaggggtctgtgaagaaacagtttgtaatcatgggtctcgaagcctgagattggtttcataaaggcaaataaaagcacaaaagtcatggtgaatttgatcacattatagatgcttctggtgtagatatactctgtaccattttggtgcttataaatcaaaagcaaaataaaactaatgagaaaacaccattgatccagcagcaaacgctcggaaataacactacgctccatcgtgccagcaaactgaaacgcttttgtgggaggtgggaatgagaaggttcagaattggaatccctggctcacgtgggaaaatttaagaacgaactatggtcagcttgtcctggcagtaaataggaggcacacgtttctgcagatgtaggaagggcatacctatattcttgtaaggactgaggttgtttagaattgtatagagaaggcggactaattagattaaacaaaactcttggcttaatatgaaggaaaatgactaatagttaagtctattcaactatggtgtaaactctcaggggaaagagtgagagccccacagcatgactcatttgatgtaagcagcagaaaccactgtggagaactactatttctgaaataatccaaactacatcagaaaaggttataaaaagactatttagcaactgaacaacacatacttctttttcatttcaattgttgtgatttggagtgagagggaaacgaggggtattatgataattataataaaacagttacttgcgttctgagatctagtttctctagagagcttgtagtttaacaaatgaatctgacacccctactgggcagggaataattggcttaaatccctttggtgtatttactcaggccactagattgctttttctagcctgaagaaagctttgacaaattatgatcaccaacattttgctagcccaaaaagtgctttctgattttccagctttacaagcattctccccttctccctttcttacttcacagctttgcctttcaggtctcacctcctcttccaggtccatctttttctgctgtcttcatccactcttatttagtgctcactatgttgcaggcatttgagttacaaggaagatagacccaagtcactgctgtcagactagtggtaaagataattataataaagggaattcagggcaggaggtagatatatgcacaggatgctaccaggagcgggttccttattggaatttacagggaatgttcataggtgtgccggagacagagaaattgtggagggcattaaggcaaagctaatgatcttggaacttgtccggtaaaacggtgattctcaacttgataaaacatcagaatcacttggaatagaatgtagacatgtaggccccacaccaactaatttaataaaaacatgtgaaggtgaggatcaagcatagctaatttaaaaaatgcccctcagtttattctcaagtgaggctgagtattacaaattactagggaacccagtgaaagttttaaactgggaagtgttgtggcctgacttgaattttcaataggtcactggcagctatgtggaggatgcgttggagggtggaagaccagttaggagactgctgtgaagtcaaatagaatgagggtcttgaggatctgaactgtatttttgaatatgggataccaaaggaccctatacaaaacttattcaagaggtggaatttgcaggatgtcatgatgagttgactttataagtgcttgatgagtcatagaagggacagccagagaggatgagacgtaggttggggaggatacactttgtgtatttctcttccatccctgcttctccccccaacacacctaatgcacattgatacggtttttgtgtctctcctagaggtatcatagttttcatatgttacttttagatgtatttgtctaacttttctttctttaattcttttttgagacagtgacacactctgtcacccaggatggggtacaggtgcaacccctgccttctgggctcaaggacatcagcctccccagtagctgggattacaggcacatgccaccatgcctggttaattttttgtattattttgtagacaaggggttttgccacgttgtctaggctggtcttgaactcttgggcttaagctatttgctccccttagcctcccagagtgcccagcctaaaattttcaattctcatacaagtttatttattcatctcagattctgcctcacccccaaccccctacattccaatactgggccttccatacagccagtgaccaggagagtaacattcattattgaggtaggccagttcaactgtttcgaaagtttgtgttgtatctcatgagggaagccaccacccattctcttcttcctatttgggagtgcatgctccggatcctttgattttcctagtgcagcttaaagtctaggtttatatgtgaaccatcccctaggttttacaataatattgaggctaaaggaagtacatctttgggatggatctcgtctgcgactataggctttcaatctctgtgtagggcctctagaaatttgtagaactgaaatgaataaaatttctcaataccagcagtttccagctatttctgtgcttaacaataggaaatgtaagaattggcagcaaacatttgggctgattctgtttgtgtaaagtgaattagagaatggattctattacctagtatcttacactaaaatatgaagcagaaggacacatttgaagtactttaaccacaattacatagatacttctagtgaatgtgaatttgggatgatgaattattcatttaaatcctttggttctccttgtaggttctaacaatgccaggtttacagaccttaggtgtctcctagcccaagggtggggagagaggctccccctctcttctcctggtttcatccatcctctggagtcaagttattaggttattaggttggtgcaaargtaattgcggttttcrcaattaaatagcttggttgctggagctccttttttctcttagggactgctgtggctacccaatgtgaagccacagacctgttaaggctaaagagcaggtgaacagtagttcagccagtgaattagcatttcaagggccagtgctccaaagggcattgcccaagtgagcagctaagtagaagcaggaatttactcatactgtaatgtctgtgtactatttctgtgaaaatgacttttgaattgtctgaaggctaaacatttggtgctaaactttaaacttatctattttgttgtaattgtctctagaatgtactttgcctgtctcaatattaaagagatcaaatgaaacatgattgctgcttgattattgaggtgacactaattaggaatatcaatttatatttttctctgttaagaggccctgaggaatgactgtggtagatcgttggcctgactgttgcatttttgtaggtccgtatgtgttttataactttagttagaagaaatatggtgtggtgggaagagcattggtttttaaataaaatgatctgagttcaaatcctgtattttgctatttactggataagtggtcttggtcaagtttgttaayctctctgagcatatatattttttaattttatgcagcttctatatattctacacctactgcccgccagcatatcgctggatgctggtggtatgatggcaagatgggaacaggtagggtctgtgcactcctgtagcttccaggctaatcttaggttgctcatctgtgaaatgggtgtgagaacctcatcctgcagttgttatgtgttgtgtgagaattaactgggataatgtgtttgaggtcctggcagcgattagaggctcataattggtcgatgtagctgtaggatttgctttttctgctgagcttagttgatgacaccttctaatttgctaccttaaatttacagcagctatttttttttttcatagatcttttstgcattcacattttaactcacagatattgttcaggtcytggaagtgtgagctttctctctttcttcttgaatgtcttgtatataggtccttaagcaactcattcatttcagagatattctttttattctaggcttttgagatacaacagtgaccaagacagacaaaaaaaaaaatcttgcaccattaaggtcgcattctagggggctctaaattatgaaattgaacaataaatacaatataataaacaatacaattgataaataggaaagtatattatgtgttcaaaggtgacctaagtattatggtgggagaaagacyagagtaagggaaatcaggagggtgcatgatgggggtgggtaggggttcagatgtgatttaaaattgggtagtcaggtcagtgagaaagtgacatttaagcaaagatttgaaggaggtagggaagttagccatggggaggagtattccaggccaggaaaacagccagtccaaagaccctagggcaggaccttgactagcaggttctaggaatagcaaggggaatgaatggagaaaatgtaaaggattaggagaaaaaccttgtacagagatcctataatggggaggtattctactgcgcaccaagctatctggaggtcaggcttcctggaagcaacaggagtatttaggagtttgctagtgatgttgggatttaagagccaacaggcagaaaaaaaagcttgtgccaaggctcaaaggaatatgactagtgtctgcaaagggcagaataaaggaggccgtgatataaaacaaaacaaaacaaaacaaaaaaaaacccaataagctgttaaaggggaaaggtaaagatgattatatttgtgctttgttaggattactctgattacaatatggaaaataatcattgctcttgatggcactgataactgagacacaaaaattttctcctgaagtgatggatgtccaagaacaagtagattatatagatcatctctttaggtttgtgacccgcttctcatctgatccaccttaggctttaattagggccgttattcattattatggccaatagtaaatttcttgccaggatactctgacttgtagcattctgataggactaactgattcaaagcctgaaattgagtcactgtgtaccaaggtcaggcctcactaattctcaccatggtcctccaagttatgcgtcagtggataaagatttttttttttttccaccggggcgttcctgagtttatttggggcgcacccgggcgagggccctgcacctagaaraaggtgttgggcctcttggtggtgaatcgtggcttgtgctgaaggcgcaggacccggtggggcagcgggaacttgatcttgcagtcgtggaactgcttgayagcctgccggcgtcacttgctggccgcgatctcttccaccatcatgatctgaatggagtgggcccgggcgcggtgccgggcgcccatgtctcggtagcactgggtgacagcgcccgcggtggtcaggtcccggtattcccggtacatgttgtgggtgccgctccgggagtcacagcgcagccagatcccgaagttcttcacccgcagcggggacttctcaaacacctgaccacagtagacagtctcccctgaagacttcttcattttctttaactgagatacgaagtaccagaagcgggacttggcgacgacacgattaggtgcaaagattcgcatgcggtagaggggcggtgtgtggcatttgggagtgggcaggcggcgacccactactttgtactctcttagtgtgcccgaggccttcatggcgtcctctccgcgctcgccgccacccgcaaaagctcagtggataaagattttaagtggacaattggagactcagtttaggagcgaactggataccaaatttcagatcaaatgtttgaccctgaaattctggcactgacagttatgcaggagaagttgtgttttgttatcgttgttgttgtttttaagtctttttaatcctctcagattctgttttataaataaaaagcacacacacatacctagatttctgagayttttattttgagatttgtaacatattaaagaatcaggctgggtgcggtggctcacgcctataatcccagcactttgggaggccgaggcagggggatcacctgaggtcargagtttgagaccagcctggccaacatggtgaaaccccgtctctactaaaaatacaaaaattagtcaggcgtggtggcgggtgcctgtggccccagctactcgggaggctgagacaggagaatcacttgaacccaggaggcggaggttgcagtgagccaagatcgtgccactgcactccagcctgggcaacaaggagggaaagtccatsccccccaccccccaaaaaagaattgatacgatctttgcatattcaaattttattaacatgaaaagactgaatacagtagaatatgtaggagatcagctgtttgattagataaattatcccctgctggaactacctstaaaattgctgtattttcagtgcattctgtctctagctttgtaaatgactgttgttctggatcctggaggcagtatctgtccactttcacactttgaagaagcctttacatgctcatcctgcccagcttctttccaaaaagaaaaaaaaaaaaggcacatagtgacgaaaataacaccagtaaaaagtttttacaaaacctttcagattttaagattgtttagtgttgttcattattaaagacacacaattgataaacagtaagctaaatatttgtaataaataatgacttctttttcattcagaacaagaaaatactgttgatacaggctgtctttactcttacaatatccagccaaaagactgtttaccaaaattactaaggacagctccatccctgtctccttcaatatagttatgtgatacatttgtaagacagttatttcatttgtcacactctgcattgcatctccctccctcccctacttcttggtcgatttaaaaaaatttatatagagtaaaatccactctttgtgttgtactgttgtatgagtcttgacagatgcatagttatgtattcattactacaattacatgtagcagttccttcacttcagaatttccctcacactgccgcaatatgtagccttttgggtctggcttctttcactgagcaraatgcatttaagattcatccatgttgttgcataaatcaatagatcattgcttgcgtagcattatatccgtatcacagttttatttattcctttgggttgtttcaaatatttggtgattatgaatgaagctacaataaacatttatgggctgggagaaatacgttttatcagtctctggtgtggtggtttatggactttctaaaaagcaaaaccaacagatacctgggcccacctcccaaccaacctaatcagaatctctgtagatggggtctgggctaatagatttcataaaagctccctacatggtcctgctgggcaatcaggctgagaattattgcttggagacgtgatctttgtatttttggtaaatgagctctcgaagggtttttattattatttttgcttggcaaggtttagtaatttgagtaatataagattatgcttcatattagttgtttttcttaaggacttaatttcatttcaaggagagagttactgtatgctaattaaatcaaggcctttttaaaggtacatttattgaggtttaagtagtcatgatagaaatatatttataatatgccaattatatccctcaagaatattttaataattatatatttgattaaaaggcgtacttgttagctatacagtataattatatgtttgaataaactattactagaactaaatgagcttccttaattaccaagacaattattttatattgctgatgaaatatattattatcttacatatatattggtagtgattcttacagtgttttataatgatatttaacaaccagttaattaattatgttgagttatggcatgaaataacattaaatgttactataaattggacattttggatatctgacattaaaataaagtaagatactttcacatctagcattaattacataagaacacatggagtttaaattaatttcccaaacttagtagaaatgttacttgaaagcaatatattttgataatcaaagtgcttaccaaggtgaatttttatttcagcctaaagtttaaggctagttttattcgtttgatggagatcctgagaataattctgtgaacactaaatgtttgaaggcccttcatatgtaaagttctcagaaataaagtctttttaataagacttatctaaagtatttagattatactaattattatttctgatataaaatcgttaattgttaattctgacataaaaactcatttataattatgaaagggcacatttttgatatcctattactgttattattattgttatttttatttatttattttttgagacaaggtctcactctgtcacccagrctggagtgcagtggcacaatcactgctaacctcagcctcgacctgttgggctcaggtgatcctcccacctcagcctcctgagtagctaggagtataggcgcctgccaccattccttgctaatttttgtattttttgtagagacggggttttgccatgttgcccaggctggtctcaaactcatgggctcaagtgacccaccgccttggcttcccagagtgctaggattacaggcataagccaccctgcatggccttattttttaatatcctcttgatttaccttttgaatgttattagctaatgaacatgagctgaatgtacttgaccctgagacctttaagagagccaagtctttcagaaatttgctttcttgcaaagggttgtagctcattaccaggagcatatatggtccactattgccaggaaaaaagcttctaatattagtaacaaagagctaatatttattgggcacttaggatgtgcgtgcaccttgcttcacgcagattatttaataacaatcatgtgttttaagaacccttattagcctagactttaagatagggtaaattgtagtttggaggggttaagtaatttgtccgtagttgttcgctgtttgttcataataaataataagctgtgattcatacctaggttgtctgacttcagagatcacatgcttaattcctgaggcactctctattatcttcatttgcccatctttattgcacttaaagatgccctatttacctttcccttagcacaccaaacatattttataactctagtcacttttttcctctttgattcctgtatttggttatgtagactgactcttccattaggatctaaatgatttcttttttattttaatttttttatattgacagacaacattatatgtatttactgaatataactggatattttaatgtatatgttgtagaatgactaaatttggctaagtagccaatgtgttacctcatgtaattataatttttgttatgagaacactttacatccattctgttagcatttttctttttctttttctttttctttttttttttttttttgagatggagtctcactctgtctcccaggctggagtgcagtgatgtgatcttggctcactgcaagctctgcctcctgggttcatgccattctcctgcctcagcctcccgagtagctgggactacaggtgcctgccaccaggcacagctaattttttgtattttttagtagagacagggtttcactgtgttagccaggatggtctcgatctcctgacctcgtgatccgcccacctcagcctcccaaagtgctggcattacaggtgcgagccactgcgcctggcctctgttagcatttttgaagaatgcagtatcacattttctgtagtcaccatgttgtacagtagatctgttgaacttattcctcttaagtaaaattttgcgtcctttgaccaacatctccccaacccctcccaaccccctacccagcctctgatagccactattccactttctacttctatgaaatcagtttttcagatcccatatatgagtgagatcatggagtatttgtctttttgtgcctggcttacttcacttgccataatggtctccagactcatccatattgttgcaaatgacagcatttcattctttttttaaaggctgagtaggatttcactgtgtacataataggacgttttctttattcactcatccattgatggacacttaggttgcttccacatcttggctaatgtgagtattactgcaataaacaggggaatgtacacatctctttgacatacctatttcatttcctttgaatatatagacctagtagtgggattgctggatcacatggtagctctgtttttttttttttttttttttttttgagacagagtctcgctcttgtcacccaggctggagtgcactggtgcgatctgggctcactgcaacttccgactcccaagttcaagtgattcttctgcctcagtctcctgagtagctgggattacaggtgcccaccaccatgcccagctaattttttttgtatttttttggtagagacggggtttcaccatgttggtcaggctggtctcgaactcctgaccctaggtgatccgcccacctcggcctcccaaagtgctaggattacagatgtgagccactgcacctggcctgtagcttcatttttcatatttaaggaacttccatactgttttctataatggctgtactaatttacatttccaccagtagcgtgtatgggttcccttttctccacatcctcaccaacacctaccttttgttatttgataacaaccactctaacagacatgaggtgatattaaataactttttctatgttctatttgcacattggctgagacatggtatactctcaataactggttggctgaacaaagaacagatataaattttatacacggcatccatttttgttggattgagatttcccctttatttcagaggtgccttagaaggcatttggaaagtgagtcagttttcttgcatggtgcagagctagcttagcctgtgaggtataaaatcttaatgccttttatccatgggcaagtttgaagttcccctaaaagcatagtgcaatactgctggcacatacaaggaaacttgcactatgatcatttttattctgagagagacaatacacaaccagtataggtaagccgagagatgtggtacctgggagatgacagatgtgaacactgtggtatgcattatatggtttcttgcttgaggaaaaggttattgaaaaatatttattgtagacaataatagattatactttagtagtggccatggttaaacccaatagtaggagaccttttctctctgtgaggaacacccaatataattagggaatcagatcattaagccttaaatttcaaagtagatgtaacagatggaaaggaaaaactagaacttagactactcacctccctaactgcctgcttcttgtctgtacttctttcttaggaaatatatgaatttcttagcccatgctaagtaatttaaggaacactttgtcccaagaacaatgtaatcaagaaacactgctactttctgctggatgtttgaaaggggctttttatttttacatggttactctgaagtaactcaaatcacagaagctggctgaccaaaagggcatgttcctgtctttggtccattacttgcttttgagagacataattcaatttaagatctgcatttctgatggagaaatatccattgcccatccaggtaacatcctttcacaaccttctgtcaccaaagaattattcaagtgaccttgtatgtttgcttaaggttgggagtgaccacatccctggcagttccgtaatatacccacatattttattgctgcaacaaagacatagagtatagtccttaaggtcctatactcaaaatagaaagtttggataaagctaattgattgtaggcttgctgttgttcattatcttaattagtctaggtaattaaatcattaattgattggagctgatccctgctaaaggaagtaataaaatagtaaaactcagtgcttttctgtttgatcccataagaactgccatttcagttcttcattcgcctcttcatttgtggtgttttgtgctgtccagcggggacagtggcacgggaggataatgctaacctgtggacattgctgttgcttcagaggcatgctgcagtgaaatcaggaagcaatcccaacctggctgtggttaattaacactggacgccaagctatgcagatgcaatgcattatgaagacaaccctgactcttggcaattagctttcattgtttgttgtgctttgcttgggtacatctctgagactgtgaatttccatcaaaggactctgacatgcattcctgcctggcatatgctcacgcatctctgctcctgagatgagcgcttttttttcttaagctcaagttcagagccttgggataatcgctctgtttcctaaatatatgaagttctttttaaacttcaaagccacagtaggggaaggaaaaaaaagagagaccatgcagacttagatggcttctagtgaattgaattggcaaaaccatgaacacttgtctttagctgctgaaatgtgagatgcttccataaagctatttcaagtctgaaaagttgctttttaaaatgaatctctaatccaataactacaataatattcgagtcagactaaataaaggaaaggtaaagcggtaagaagttgttttaccttgggataaatatcaaacctccctgaaaatcctattatatctaatttcagaagaacttccgtagtaagcttggtttgatcaagatcccttggaaacgaggcagttttctttttttttaattcagtgttctttcttataatgtttctcttgaggagaattgtggaagtaataaaattcataattggcttcttttctcctttgcttggactaagtgagtctggcagttctttgggagaatttgagtcctgtacttttctggtcgacaagatagcagtagtgaagcagcagaattgagttgaaatgaatgcctggcttggaatttacacatatggatacagtgctgactaaatgctccgaatcacagttggccatttttattactattgatagagctttcagagaactctgctcatggaaaaatacacttaacaaatataaatgctaggtgctattaccaaaagaaacacctagggaattgcctttactatatcagcagtagattattattactactgttttaatctagtaagtaataaacatgtgatacataattataaagacattttctaccaagacatgtatgtgcttcctttaaaactattttatgtgaatatgataaattattttttattctcaatttgttatgtgtttaactgctgtctaacttaagaagcagatatatcttttatgtcttctttgctgttgcttcttatgaattttaagagacaaggaaatgttggtttagaaatggaaaatgatgttcccaagtaatcaggaaataattcaaaatccaaaactagtattacttgataccttaacttctgggaatttgtttcttgtatgtgctcctctgcatttgttaaaattatagaatacttttgtttcaaaacaaatttaggtacagaaattagctgggcgtggtagcaggtgcctgtaatcccagctactcgggaggctgaggcaggagaatcacagaatcccagaggcggaggttgcagtgagccaagatggtgccactgcactccagtctgggtgacaagcgagaccatctcaaaaaacaaaacaacagtaacaacaacaaaaatttaggaaagtgatcatactcattaagggrataatacatttttcttgtgagaattacacaaatttgaaaatccttgggtcagggagtggtcaacactgagccctttttttaaacttattgaaaattgcagtaatataaggagaggctcagatagaagtgtgttataacctgttttacatggatatgatgaatttatacagttatgasttgtggacaatagagggagaaaaagattgagagccattgaactttcttttatttctttttatttatttattttttatatttttaaggagtcttgctctatcgcccgggctagagtgcaatggcatgatcttggctcactgcaacctccacctcccgggttcacatgattctcctgcctcagcgtcccaagtagctgggattacaggtgcacacaccaccacacccggctaatttttttttttttgtatttttagtagagatttggccagactggtcttcgactcctgacctcgtgatccgctcgcctcatttctttttaccatctaaattgcattatctctgtgataggctcctcgggtattttacctgtcttaagcttccatattctgtttgtacagtgctttgatagtgtacagacaactttcatacacatcacctcacttaacctttaatgcatcccctgtaagggagacattaagtccattttcaagttcatgatactctacgtaatgagctaggactcaaactcagattttctgattccaggaacagattttctttttaatgaccttaagcctattcctttttttccttcttcccatcctccttcctactctgctttcctccttccctgtaactccttccttcctttcttccgtcattcattcagaaatgcctactgagattatattactgagaggaaaccaattcggctggagtttagggagtgtgtagggagatgcagaggatggagtgggaggggggaaggcagccaaccctgcacaacgttgctggctctggtgtggagtgkgaactttgcctgctctgtaaactcagtgttcatcaagggaagagtggttgatcaggtgagagagaatgctggcccctactcttatggtggctgtggaattggagagaagtggatggatgccagaaatatgtaggcaggttgaataaacaagaggaagtaaattatttcctcatatattgagggtragtatataaggaaatgtcaaggatgactcccagatttgtgttaagagcacctgttggggtgattgtagtatttattgataagaaacactcggaggagggtagagttgtttggcttgaatggagaatcatgagctcggtttgggacatattgaattttatctgtctgttaaataaccttctggagatgccaaataagcaatttgatacttgaatccagaactcagaaaactgggctggggatattctcttggaagtcgctagcatataaatggtracagagccacgggattagacaaaatcaacaaaaaagagaataacaatgccgtagggttcaagacccaagctttgggttccccagttaatagaattaatagaggtgaggatgagaagtcgaggggaaacaggagaaaagagaaagaaaaacaatagagttggaggaaaatccagggaaggttgtgtcctagaggccgcatgcatagaggtttggaggaaagctgctctcaaatgctgttgatggatctgaacatgtccattggacttggtaatagcagggacattaatgacatcagggagactgaggtggtggaatggtggaactgaaagggtaaagaggaataatttttaagggagaagtggaacagagaattctgaatctgggaatattcatttaactcagacaattcaaagcagaatattttttatgtaatatcataagtactcatttaacaaaaaaagagcactttaaacttctaggcttctagactttatcatatttcttcactttcctgctgatctcctcaaagaatagtctattaccatcctgcatatttggtctggagaggaagtctaaatagatttccagattcactattggtataatccccaagtactttttcataatttggtatctgaccagctcttctgctgatttgatggaacccttttatggtgaactgcttaaaattctttatgtaattggaamttgtctttatgaataatacaaacttctccagtcaatccagttgattcagtagtgctaactytccccaaaatgtcctccttcctcttgtttttaggctgaactaaattgtatatcttatggccgggcgcagtggctcacgcctgtaatcccagcactttgggaggccgaggcgggcgaatcacaagatcaggagtttgagactggcctggccaacatggtgaaaccccgtctttactaaaaatacaaaaaattcgctgggcgtagtggcgggcgcctgtaatcccagctactggggaggctgaggcaggagaatcgcttgaacacgggaggttgcagtgagccgagatcgtgccactgcactccagctggggcgacatagcaagactctgtctaaaagaaacccaaaaaattgcacctcttatattgtggcttttcttaaagacccagggagaacctcttgtgcagctctcctttacagatgtctatcaaaaaactcccaactgtccttgttggctttatttttatctcttcaaaactggagctttctgaagacagggatactgtttctttattctcatgaactcacgtagtaggtaatcagtaaatgtttgttgaatgaatccatgaacctcaactatgctgatccaactgagaagcaagaagtataaaaaaaagaccacagaagataaggcacaccaaataagcacagtactttatttcaagtaaaagcccagaaacctcactcagagcattttttttttttttactttacacactaaaatgcttatttatctggcagccattctgtcctatataaacgtagaccaactgctgacccactgataaattccagaaaaatccaagcaaccgtctgacagggaaattaaaagctatgaaagtagatgagaacaaaagctacaaaaagtaggagagcaaactaaagtgacacaaagtaattgagagtcctcacgttaaaaaaaataaagtggtctgccaaggccttctatcagatctaaagccaaatgtataaatgaatttacttaaacagtataaataaaccctgatttatcaggaaatgatcattctgttgttcaaaaaagcagaacgacatttaatacattgagaaaagaataaagattacaataaagtatgaaaataggtatagtttagagaaacaaaccctcacttttatatggaatactctatttttaatggtggcagtaactgagatagtattgtggtaaacacatcagagtattcagggagattaaaataatttggggctgggaatgcattgcataagaattgggcatccaagggtgacaaaggaagagcagtatgtagcaaatggcacaaaatctttgggaaattattattattattatttgagacggagtttcacgcttgttgcccaggctggagtgcaatggcgcgatctcagctcactgcaacctccgcctcccaggttccagtgattctcctgcctcagcctcccaagtagctttggattagaggcatgtgccaccacgcccggctaattttatttttttttggtagagacggggtttctccatgttggtcaggctggtttcgagctcccgacctcaagtgatccgctcacctcggcctcccaaagtgctgggattacaggcgtgagccgctgagcccggctgggaaattattatgcattaacatagagaaatttactttctgtcattataatacttgagttgaaatattaaatgtactcttttacctttccatggttggatactttgtttctccccagagcaatggaaaagattcttattttttttccccctgaattatggcactaaaataaaaatttaactttcttttttttgagatggagtcttgctttgtcgtccaggctggagtacagtggcatgatcttggctcactgtaacctccacctcccgggttcaagtgattctcctgcctcagcgtcctgagtagctgggattacaggcacgcatcaccacacctggctaatttttgtatttttartagagacggggattcaccatgttggtcgggctggtctcgaactcctgaccttgtgatctgcctgcctcggcctcccaaagtgctgggattacaggaaaaattttactttcatgaaaaaattcccaaactttatgcttcctctttttaatttaaattgttggtgagcaatggtatttaaaggacaagacaccttgaatgaatattactagtgttttagcaactcaaacattggctaaagggtatttgaaagttgtatgtctgcattaatgcaacttcagatttgtgtgtgtgtggatttgttcactgcttagtgatggtaaagtcaagagttttctttaattactctccatgaaaagatttttttctcttttgtgtgcttctggattcaattgcctgtttttacaaatgaatgaaaacattgactgtgactgaggttctgtaatacaacgtattatttttctcactccttagaaataataaaagcacatcataatacatctttgctattaacagctgacctccagtgtgctgtggaaccacgtaattgaataacactttttgtagagggtgatattcaatagtagaaatgaatttaagtacatcatgatgataaagcagttgtttgacaattgtgaaagttctgaaatggaaaagctgttttgattcctttatgctgactactcttcttagtggaattcgagggttttactacagttcagtaaataataatttagatgcatttttactgatggcagcatagtttcttaaatgaaagtaattttgtagtatgatgatcaaattatrtagtttccattaagatttacagcagcagaatgtcacatgcattgattaaaaagggagtgaaatttggaaaatacaaactatttgaaatggcccatgggataataaggaatttaaaaaaccattgattactggcagttgtaccactgttcagaaattgctgattttgtattgtatgtcccatattttaagaatgccgccatcataaatgttggaattgggttctcagcattactgatatttgaaaatacacagagaaaaaaatggttaaatcaatcagggcctacaaaatggccatgtttagtttttgcccttatcacaatgggaaactcttgctaggctttctgcagattttaatgtaaaatgctacctaattgtgcaaaatattaccatggagtatgaatgtgttctttttttttttttcttttgggcgttgcactggcctttcttttcaataaagattctactgaagcaatgtgatggataccatttcagaaaagaattaattttttacaacttgtttatttagtacattaagcattcatattggtatatgaaattatattcatgaaagttactggcccaaccaagtagaatcacaaatcagaaacacttggttttaatttcaacatgttttcataaaattattttcaaacttgtccaatggagtcagtttactttgttttcctttgttaaataaatgtattctaaatgagtcattatagagggatttaattctagttgttaagggatatgggggaaaaatgtcctcaaatgcttatcatgaaaaataccatgtatttacattatttcaggaattaatcttttttacttttaatgatatgaggtgtattgacagagtttctttgtctgcctcatctttctgtggggatatgttgaaaggccctgcaagaaaccagaaacttgatttaataacttgccagagcaactgtttagcatctgtcctcaaggcaaagagttgaactgatagatttcataaagaaaatgaggaatcattatacacttcatcggaatttcatsacttgttagaaatttactcaaaggatcataaattctgtatttttcattattcaggarttctgaaaaaagartgtgcattttgtgataacaaaaattctggtagggtatgagaaatccatccttaaagaagaaaagaaytcacaacttcaaatggatgctgttttctcatgaaggatttgcccagtgkctggagagtgcttcyaatattatyatataryayaatattatgggtgtagatgccagttttgagatgatgtttatcagcactcctgttcttgarcagtgagaaggtatttattgggcatgttaagaacagtaaaaatcaggaaaaacaaaggataggattgctatgcgttatccccaaccaaacagattggtaacaagctatctagtttcctgcgaaaaggcgatttctstattatkccggagtatttctgtatgctctccctggagacagttttcaggcagtttcaccatgaggcggcaggtgtagaatcccctcaggatgcattttgaacctgtggtcatacagccttcctgagtttaaagataaaacgtatcctttgttgttttgtaggaaactaaataggccttgataaagtacagatgtagataaaactttcaacagaaaatgactgaagaatttttaaatccagctatttgttaataaatgtacaccacctttacatttgtaacatgaatcataggagatacacttgctacatttccgcagttaacagtaatcctttctcaagaacatttaaaactatgcctacagccaccgttttttacactatcactaactgtcgtcttcgctgtccttgattcttgattttcaccagcattttcaaaaatggatagtcttaaaagctacagcagttagagacagtgtaagtaaagcactgaataaacatctatcacacagtaggtattcagtgcataagtatgcattcagtatgctagtactctgcattttacaatatctacatcatcaactttgatcctcattttttgagtgttgtatttaaaactggttgccttaaatggaaaatgacataaagctttatgtttgtataaaataaagtttcacaaatttatactgaatgcttactgtggacatggtgataatcatagcagagactacagaggactgtgaatgacactttccatgacctcagaagtttagagcctcccatggacacttgtaattaagttgtttctgcactatggcagtggatggaaaattagggatatgttatttaaatgacaacccatatttaccagtgctctggtagaaagttttgataacttcagttgtttattcttcccaccaataatgtcattgcatacaattgtgtgtgctcctccccaaacacacacacacacacacccacgcacccacacatacacacctgtctttaaaaaaatccaggcctgggcgtggtggctcatgcctgtaatcccagcactttgagaggccaaggcaggtggattacttgaggtcaggagttcgagactagcctggccaacatggtgaaaactcatctctactaaaaatacgaaaattagccgggtgtggtggcgggcacctgtaagtccagctactcaggaggctgaggcaggagcattgcttgaacctgggaggtggggattgcagtgagccaagatcacaccactgcactccagcctaggtgacagggcaaaattctgtctcaaaaaaaaaaaaaaaaaaaaaaagtacataaaaataaataaataataaaaaatcccaaatcaacaacaaacttacaatctgaaaattccaccaggaaaagaatgctttaaaatatatttaaagagccccatgatccatctcattgggcctctagatttctctggctattaagctgaggatggtacatgaagggaatgtaaaagcccttttctcccttttcccttccctacgtatagtcagtcctcagaaattagatttattcttttatttccaatcaactacttaattttgaccctagttccatggtcgtgattttctgactcttatgttttgtccaaaagccaaatactagacaacagacttgtgcttatttagtggaagcaaaaataggattcttctaggcagaaactgttactgttgttctcacgcttccgcaagcattttgtaacccatttgattttttaaaagaaagagaaaactaaaatgaagaaaccgttattggaaagttcaaggtatcatctctttcttctgtgcacctctgtgtagctgtgatgtttgtcgacaattctggcaggaatactaagaaagggaacggtttttacagttctcagaaccttctacagcataagcaatttatgtggatttaaaatgtatcaatttaacttggaatgaagtaaaaactccttatcttggcttacaaggccgttggttgacctagcttctgcattcctctctgccgtcatcttatgtcagaccctgttagctcacgacattttaattctcttgacattttcatccattgtcttccctgttcttgtaattctttctccgtctaacctaactcatctttctcccctgccccctcttctgtgatgcctttcctgaccactctaaatggacctctctcctctacttccttctgctaatcaccaagtttatctaattcataacacgtcccatctggattgctcagtgattacttgtccccccaccccaagactggagggactttaactgttttcctccacacrtctagaatttaatgtagagtttagtgcaagtaggtgttcaataaacatttgatagttaagtgaataaatcaatgagttaatgggagagagctgaatttcactgaagatgatttactccttcatctgcaagataagggaaagagccttgccacagaaaatctgttggaaagcaagaatggtagrggccagccctcttggtttcccatcccgtgtcctcttctctctgttgtgttgtgttgttaccttgaaaaacataacgtgaaggtggtgtttggtcctcaacccagctgaggtctgctgcctctgaagatgtctctgctgatccagtttctggagcgcctcttgggttgtgcttttactctcttatgtcaggtgtcatactggagtttctgagcaatcaaatagaaatccyatatagggtaaggagtcaataacatttattttgatctagattttggtttggagcaggtggttgggttaaaagtccaacaagataatctgagaatagagagaaagcaaatgattgtgcgtgtaccactctcacatttacttacagtaatttccaacttaagaaaactggatatgctaaaacaaagtgaaagcaaacttcagttgaaggctttcttaagtagggagcatccctaggaaatttaaaatatgatttgatttatcatagatcagtttattaattttctaggagcttctgccttagaattttgtgattctatgaagttcagctatagtagctttgatatatagatgagaaaatagaataaaatgtttatcacttactcaaaaattatatataatcatttatgcaacttacctaccaatgagaatgactccttggaatataaattggtatctgatagtgtctgggcatataaacagactattgacagacattgttgtttgcctgttagacgcttccttcttgcttgcctataacattgacccagattttatctackctcattctatagtaacctgctgtgtatgccagtgggtgggggtgcgggggtggggctggctcctaagtggcaaatcttactggttgaaaaaagtgaagtggtctcagtttcctgctaagtgatgcacttaaacatggccatgtgattcaatcctggtgaatgaaaatttagagcaaatacactggggagtttttgagaagggtttatttactcacaagattggcaccaagacaaagatgtttccttttctgttcttgaatatttcctctgtatgtggtgtttagagctgctgcaggcctgtagggatcatgagaggaaccagtctaaggagacaaaccagcacaatgagaaaggcagaggggacagacggatgggaaaagactgagcgattgagctgctattgagtagctgaataaatcaccctccctcaggttttatgtgacagaatgatgtccttattttttaaaccacttttagtaggatgttctgttatctatagcccaaaatattttgacggatatgtttgttgggtcaagtaaagaattgtttgggactgtagcagtgcttacagttccaagccatggggctccacagtaagaaagagaacaacaaagaaggtacatattttaagatttaagcagctccgaaggctaaacatagaaaaaaaaataggtagtatacagatttgccaacacccatgaataataggtatttattatatgcagcttaaaaagaaattatgaattgaatttgtgaattttgcttcattttctgaatgtgggtaaaaatgtctaagcacaagcaagtaagtttccttggcatatgcagaaaacaagtgtttttaatcctgaataaaatgtattgttgtttgtcatttttatcttctgctggtgagcatgtttagatcctacctaaacatatttttcttatacatttaacttttctatggaaaataccaaatccctgaacatttctatttcagtgggaccgattacaaatcatgttttccatcagacttttattgtagaagtgttgtttgtatgaatgttatcagtatgcatttgttttggggttagaggcttctctaaattggatacctctatggattctgcttccttttgctaaacatgaaaaaaaaaattacaacttttaaaatttctctcccatggctattttctattcatatctcccattccttcttgaggcaaaagaagtaatttatataattcccagaaaattatttatttcattcagatttaaaaatttattagctctgcatttaaatatattctcttatttaaaatacatcccatcactatccattgttaaatcatgttttcacatctaggtaagatattcagagatttacctgattatttacaagaagacttaaacgtacaagcatttgaatattaatgacacagacttttcttttgagatttccaatgcttttgtaaagtaaaaattatctacttttaaattattaaaacatctgcatctttcagtgcttctcaatctagcatttaggaaaatctgagggctattaacaagtctatagagaaaaaagtcaccctacaaaaatacattcaagcaacgcaagttgttctgttggcttgttttgttgtggaagtgttttgtgtgtgtaggtgttgttttctcagctttgctttgcttttactatgggacttctcagagcaatgaacatgcaaatgtatgcaaagcagtttcaggacttgctctgtagaaacagctcacttaccttgattaacacgctacatttcctcgtaaccagagarcgatttctcagacttctgtcacttacatcgaatatggacagttgattgatgtacacccctcgtagaatatgagctcctggaggaagcttaaccaccttattttctaagtactgataaagtgcttgyaaagaataagactttagggaaatgaaaaaacatagtgaatgctaataatttaagcaccttaatgcctatatttggccatgagttrctaggatacagtttctttccatgttttctctgatatcccagtttattttcattggcgtacgtcaacatggagaagaaggatatgtttgtcatgagaggaaagtgaatgatcccgtgtgggagtttctttcaagtccataggagacaagaagatgaggtgttccactactcaactgagtaaggtttcaggaagtagacaggatttacagagctgcttgaaaagtataggtgggagttgtggtggtggactgagagacagtggaaaaaactgtgaaacttaccttcaaccttcaggtgcaaaggacacgagcaagtatccccaaaactcccggcgcataataccacataggcctaacaatcatagagttaccatttacaattttgactgtttttaataacatacctcagagtgtcaggacatgcagtctgtatacattttgctaatctttggagcttggatttgaatsacactggcgttaagcctggtgtgatgaatggaacccaaaactgagtagtgaatttagtttactgccaaacattgatgttttgatttaggtttattctattgtcttgtggattaagttgacagyaactcttgacacatgttaaaaactgtgtttctttttgaaaatttatgaatttgggggttcttaaaagtctggaaaataatcttttgtggaagtatagaagtgaaggtatcaaaaggaggcgtaggtcagtgtgccatatcattacacagcacttaacaattttaaaagtatttcacgttcctgacttacttgattttcatgacagctttttgagacagatagggctaatttcaatatgccattttcttggaaatcaaagtagctttcctatggtagagattgctagtgttcactaatacgttctttattttcaagagcacatcattaaatcaaattctcagctaggaaagatgaggcaatggttaatgggatgtgattggaaatgatgtggaagtgagtggtgccacctctaggctaagctgttttaagaatggaggtggcttctgaagacaggaggtccaatggaagattccaggaagagatgatagaaccactagatggaagaaactgagtctttaagtctacatggagcaaagcctccgtacaattcacattaaattgtgacatgaatgaaacaattaatgttattgtgttcagctactgagatggtagactgtttataacagcagtcagccttctctaatccacctgctggctctttacttagtttattttcattattttttattactaatctatgtaagtgaaaatcttttatttataaattaatgcaaagctgtttgagagtctgaagaaggaaatatgatcaaaaagagaagaaggaattttagagaccatcagagtcggaattttccaaagggagaatagtaaaaatccaggaagtagatgccctcagttctgaacccagtgagtatgcaatagaatgatagaaataggaggtatgaaggaaaaaccaacatgattatgagttgaatggcactatttcaagacttttgttgttgaaatgcaagccagtatatacttggtgtgagatgggactaatatgaaggaataaaataaagttgcataaagttgcttttggtataaagttagtttagattacaggaggatttgatcacatcacattgaaaatgtgaaaggaagtcataaccaacgtattttaagaaagctggcaagtactgaggtaaaaattgtttggcctcttggaatctggttactattttacaacctcaaaggataattcagaatgctgtttgtaccaataagtatattcaggcaaatcaccttcaaatccaatagaattcttatgtaatgaaggtttcaaaagacttgtgaaatttcaagatttatagagattctgaccaaccaggagaggtttgttcattttttttttctcctttgtatgttgctgctactctctttatcccttgttcaaaacagacattactatttgataatagcactcttctatttttttttttttttctctagagaagaacagcctcagaatccttctgaacatggtactgtagacactctcctcagaaattgtttcccttggaggcagcacagtaggatggagaggaagaaaccaatagtggatacgcatatgtttggataaacgacctctttaatcaaaatgtcatttctttttttttctcttctcccttaggtccttctcgaatcaaatgagttagtacatattttagaacagtggccatggggaatattcggggatgtggccacgaggaatagttttgtcaaaagccatttcattatttttttgaactcctttcttctcattcttagtttacaaattgttttccattctgaactcttaggagagaaagataattttttctttcacatgttctcagaggcttacttttgtgaaatttactaatacctcccttgatggaggaaaagacagaaatgccccagtcaaatccatttttccacttaattattaagtctgcttaatattcaagattaaaattgtctgttaaaagggaggtctaggtacttgaatattcaaagtcctttggcatattttgaaaattgaaattaagtaatgtcctgtatatttttaagttgctaaaagagttttcttagttttcactaagagtagatttcactattgtgaaattaatattttttatgtcttttctctacattttttgtttttcattctcccccctctgtcagttacctactatcttctttcttaattttaacatcgttttgggcattttgctccattttatgagaaacatattgtgttctcttgaataaaattagcccctatggataaattactgaccatatgattaaatctaattttttttttttttttgagacggagtcttgctctgtcgcccagactggagtgcagtggtgcaatcttggctcagtgcaagctctccctcctggtggttcatgccgttctcctgcctcagcctcccaagtagctgggactacaggcacccaccaccatgcccggctaattttttatatttttagtagagacagcttttcactgcgttatccaggatggtctccatstcctgaccttgtgatctgcccgcctcgacctyccaaagtgctgggactgcagacacaagcctccgcacccggccaaatctaaatattttaaagaagaaaattatgtaaagtcatatatgtgaaaaaatatcctacctttgtgactttgttgcagaaggagttagwattgttaggagaggaatttttttaatttttcttttttttttttttttaagatggagtctcgctgtaactcctaggctgaagtgtagtggtacaatcttggcttactgcaacctccccctcctgggcttaagcaattctcctgcctcagcatcctgagtagctgggactacaggcacatgccactgtgcccagctaattttttatttttagtagagatgggagtttcatcatgttggctaggctggtcttgaactcctaacctcagttgatccacaagcctttgccttccaaagtgctgggattacaggcatgaaccactgtgcctggcccaaattttaaatattctatccaaataagtattccctcttcactcaaagtgtagaaaaacagtaatattctaaagaagagatgaaccaaataggatattacatcctgtgtgatatggtttggctgtgtccccacccaaatctcatcttgaattgtactcctataattcccatgtgtgagggagggacccaatgggagataatttgaatcatgggggtggtttccccatactattctcatggtagtgaatacgtattacgagatctgacggtattatcagggattcccacttttgcctcttccttattttcttttaccgccaccatgtaagaagtgcatttcacctcctaccatgattctgaggccttcccagccatgtggaattataagtccagttaaacctctttttcttcccagtcttgggtgtgtcttcatcagcagtgtaaaaacactactacactgtggtgccacagattaacccagtaagtcttcaggtagcaagaaatgaactaattagtacagagggaaaatattcccttctctgtagtcatatactcttactctgattttgttttcatctttctatccacacagtttattttttatttttattttttaataatgatattggtatcaattagaggtggaatcatattgctgtattttaacaagaaagtttttttgtaaggatgattctcagagtcactttagtgattgcccagcctgatttagacatctccatttctcaggaggagtgaaattaaaaacattaatgaatccatcctgcttctaatccataattttgaagagcctcttttttgcccctgtattagtttctcatgccctgatttataaaatttagaacattcttcaaatgcattcatgtgtgttgatggtactaatgatatgaatacaggcataratgtttagagtgataaagtcataggcctgcaagggactttagagattatttggataaaaccattcgtttttcatggatgagaaaattgagactgaatgtagtttgatgtatattttttggtaaatctcctataacctcatttgactatggatggatagcttggtgttctacaaaaagaatgtatccattgcaagggttattatggcctgtgtgttatgaataagaaacctgaagaatacgtgtttactaaatgtttttcttcttacataactttctttttttataacttattgctatccagataccatcttatatatatttttttctttttttttttttttgagacagagtctcgctctatcgcccaggctggagcgcagtggtgcgatctcggctcactgcaagctctgcctcctgggttcatgccattctcctccctcagcctcctgagtagctgggactacaggcgcccaccaccacgcccggctaattttggtatttttagtagagacggggtttcaccatgttagctaggatagtctcgatctcctgaacttgtgatccgcccgccttggcctcccaaagcgctgggattacaggcgtcagccaccacgcctggctatatttttcctttttgaaccacatctggataactcagtgtattcatcatttgatcttatgtactgaaagaataatgggataagggaaatgagaaggataagaaggaaaaataaaaatacatctgtcccttatgaaaacgatacatttattcagcattgtaaattactgatcactcgccaagtaagtggactaggatgactatttatgcaaataaaaattgttttaagccacataactctcatattgtcattatatagcgaactttttattgtaataaagaataattttgtaggcattcagaatttcaaaaaactgtaaaagtgatataactcaattgtttatttttctgattatttgggacattatacatatagattatcaaagacaaagatttgaaccaaggcctctcaattttaaatcaaataacctcatcatctccaaatgtagacactgatgtacgtaaagttctcagggaatatgagtagtatataaaatgtgaaacttactctgagaaaaggagactagttgagaaaaaaaaaaaaactcttattttacctaaggacctcttattttgtttacttcagaatttaatatttgccttttttccattccacatatttgctttggatagcaatattgtaccccaaaatgtcagttttcttgcttgacattaaaaaattagatcaaggctaacagagcccacacttccatccgaccttggctgtaacttcagtcacagtacacattgttgtttgttgatgttggcaccttaggaggagcatatcaagtgcaagaagcctcacagaccatgtggttcacatcacatacctggaacatacggtttgtgttgtccttaccaaactttatttaaaaggcattcatattggttttcctttgaaaatgccatagttttatttctgaatctgttagaagagttttttcattcctcataaatttctggcagagttttgagagaagccatcacaaattttaacatagaaaaattgggagatcttgaaagaaagcgctttgaaaccaaatgtaggataagcttgtttttttttctgatttctgccatgtattccagagattctcttaaacctgtaaaatctaaggactgaatttgatttagcaaacaatatatgtggaatattttttaggagagtctagtgtttgctgcattcagaatgtatccagcattttcttggctctttggaatggtatgaaaggtctcccaggataattttaattgatttttctttcaatcatgagagtgaaaagcaatgttacacaggctcttctcccccgggggaaataccatatcttacacattagcttcatagagaagttaaagtgttttaaaagtttggtctggttgatctacttttgtttggttctcttacttgagagaatataaaattaaacttctgatagctagctttcaacttttaacccatgccttagagagttagctttaaatgcgtcaaaacttattttggcttcctttttattatgtagtttcagtgactcatggataatattttaccatttcctcattttggtatttggtaaccttctacttggatggtggcttggtagagccaagtttctggacctcttagtcaaaataactctggttccgatcctagctttgccagttgcaactatgtgaacatggacacatttttggcttgtttgaccccccttcacttatttctaaaatggagctattacctactttatgaaattgttgtgacaatgtatattattatatctgaaatgtaggaggtgttcattaacctatttggatcacttctggtgagaattagaacatgtgttaattcttcgtgacatggctctgtgttgtggacctaaacatggagaattttcactctgtgcctacattcacaaatgcaacatgtgggtttgtatatacatatgttgtacatgaactcagattccaagttagctgtgttcaaatctgaattctcccctgcataactttatacttggccaattttgcctccaaattaattggtcactgaatattttaagtttttaatatgaaaacaacatgatgtcttaaaggtggcagtgaagcagacaaactttattttttactaaagatgaaattgagtcatattgtacgctgtgcactgaacttgataaagaagttcaagggttatagatgttttgatagtttctgcttgctttcagaggactgttgactcccttaggagagtcccttagcattcagatgagaacacttgtctttgaacatctccccaagagccagactggacagatgtttctcaaaatgagccgctgaaagcagctgaaactagaatttcaaagaaaactgtccaatctggcttgagtcttttatttttaaagacataataaagaggagcctagtgctcgtttggcattttatttttatttatttatttttaacaaaaagcactgtatgtaaaggtactgctttgggaaagatttcagtcggaaaatgaaaatgtgattagatttggtttattaatatcggcctgtacctcttctgtggctgtgctgttgcttgacattcttgaacacctttgattctgtatatttctctatggtgttagtttggtacactatttattcaagtccactgttcagtcagttttaaaacaggccatttatggtaaaaaatcagcccaaccagttgatggacattatataaaaccaaagtattggctggtttccaactgttcctgatgtgtttgttgccttgatatagttacatcacacccagtctgttttacatgcagcgtttgcccacaggagttcttctgaaactccaacaaaatggaaacattgtggctgtgtatattttaagctctcgtctgttggttttgttcctggaaccttcaaaaatgatttttttttccccaaaattctgacagtatttgtaaagaaagagtattgctccattgggccttgctttgtctctactctcacgccaaatataatgtaccttttttttttttctgctttctacatttatgcacttctttgtagaggcctttttgtttcctttgaaagatggttcctttcatcttttgcctttgttttcattcactgccaaagaaaagctttctcctaaaggctccagaatataaggatgtctttttatgagctctgtccattggaataacaatgtaatgctgttgcccttgaaaaatatcaggacagaagggcatcttgacatccagccccggatgcaaacacagcccatccccagaagagcatctttacaggtgcagaaattcactcaaagcaatttactcggactggggaaagctgatcactgttttttctctctctaggattgtgaagtttgtgaatattgtttgagcacatgcatattaatcatatgcccacagagagcagtaaaatcctttgaatgaaaatattcattgggaagtaaatgaatataattataattcgtagaagcacttttgtcaaagtgcaatctgtaacccttaaaatcaaaacacagcaggcacccttaatattgttctaaataggtgtcttcttgtaaatagtttcctgttaatcaatcttaacatagctccctcattcttttattatttttcaacatatatagaaattactataatttgtgtattagtctgtaaatgataggattcagtgtaggttagttggaaaggaagaaatgagtgaggctagttttactgagcccagtactataactgagaccttagtcacatgatttcctctgcagtgtgaacttgtaggggaaagaaagagggatatcattgaaggaaagaggagtatcatggggtttgcagtcagagggacttgggttccaatcttggttcacttgtcagctgtgtgacattgagcaccttattagcttctcccagcccagtattgctcatttgtaaaatagagatggcttacaaaatcattgtgaggagaagtgatgatatacaaaatatagttcttgggacataatacttgtttttattttgcagagaattgggtttgctggcaatcacattgggagtgtttcagcttctgtmtgtgtataatacatgacacaaaacgttggtagcttataaaaagacatctgttactatcacagatttctataggttagtaattcagatagggcgcagcagagatgacttttcgctgctccaccatatcttagctgcaatgagaagactctaaggaggggtgggtagctggagtcttctgaccttacctactcacaagcccactggttgatgttgggacctcttgaacattcgctgctggtacagttaggactcctcagacacctccctttctgtctgtatttggtctcctgatgagttctctctagcatggcagcttcggagtagttggaacccttacgtcttagcccaggactcctggttctggtcggggaagaaaagggaagaaggcagaatgaagactgccagaaggagagtcggcagaagccgtgtctccttgcgacttagctgggaactcacatagcatcacttccagcatactctatggccagtgctgtcacaaccctgtgcccagattcaaatggagggaatagactccccactgctagtggaaggagaccttatggcgtgagatatgtgcatctttggaaaatatgacctgccataggactggcaagaaggacttttaaattttatttcttcctccttttccttgatgacatatagaggaggtgggttctgagagtcaggttggagctgaattggaggcttattaaaaccagcctgaaaaaagtgaactgtttgcaaacaactgatgtcctctgtaatttccttttctctctctctcacttatgtatacacttttttttttttttttgagaaaggagtgtctccatgaaagagagaggcttatccaagttatgaattaacatttttcaaagaagcttaacttttagggtcttatattctccctatgttttcataaattttgctttcaaacctgacagtcaaatcatgaatgcaaagtcagatttgaagagaattccttcagagagacaccacagcacatgcagaaaatacagctttgtgtgtggcactcaaaagtggtatgccttcttaagccagatccaccttttcttccaagcctgctgctctttttttatattcctcttacaaaagttaagatgtggaaaatcatgtggacctattaaggcagtgattaaggtaactgttggagttattgttaaaactcatctctctagaacccaggtttaaaagcctttagacactttttttgggaaacctgcaagtcatagtcttgaatgcttgaaacaaatactgaaaacaaaatagcaacagcagaaactcgcttacaaaaaaataaacaacaactcagaaaggaacagcaaaaacctatgataggcctacattagaagagctaaaatagtgaatatctgttttatacacttaactgagtgggaagaaaacatgtaattagtattactaaatctttgatatttaatgaaaatatactcagacctcccccatttcagcctccttaattttccttaaatgtgatgttctgttcaatgttttaagaaagagctttgtacatcacctgctacactaggataacattttggcttaactgctaacaacaaattgccataggcataaattaagggaaaaaagggtgttaattatttttaaatgttttttataatttcatatagttttctttttaattgcaaaaatgtatatgttgtgtaccacaggggtttttaatttatttcttattgacatagtacatattttgggggtacgtgtgatattggtgtaatttggatatgtatccccccaaacatttatgttttctttgaaaggtgttaattatttaaagcccaagttcaggcttcctccctgggaactcctgttgttagtttttgtttgtcatgctaagaatgggtatatcccggtaggagtcgaagtctcattgaagaggtttaataaataaatttacattcttatttagacttctctcgtgcaaaaacactatttgttgtttacctaatgcataatgcatttttattatgttttgatgagtcacatacattctgcacattgtgtggttagcttgtactgaatgacaaaggtgtctatatcgctattttgctgtctcattgaattttttacgtacatatgttcataaatgtgggctatgaagtgatttttcatatttaagggtttaaaaaaaatccttgcatgttttgtgggaaatgtttgtagaactttttggagatttccattgtcttctcctaccgtggtcggttgttcagcaccttttagagctgaagtaatgtactggtttccaagaatgtaataatgaaaacagtagatattatgtattttaagtggggaagggcaatcactgaattcttattgctgtagttgctttttatattaagtagtttgctagaaacaataatgacagtggagaaatgaatttatattcaaggatgggaattttcaggtcatctttaaaagaatgtttgcagtggggtatctctacaaaagcaacttgtctatatgacgcatgcacatcgttcagggctggcggctttgcaccaccactttcttctgctgctaacctgatcttggttggagaagcttctcctaagcagtctagatacgtgtgtgtatggagatggggaggaggtacagattgagggacaaaagcttttaaagacatggtgcttctctcagtggaaaaagagaaggctgggaataacagaattatctcaagttctagcagcttcttggttaaactgttgcttcaaactagcctgttccaaaatatgtaaaactgtaacccactgcatctatgccctctctttttctttctttttttttcttcgctagctatagttctctcagtttcttatttgcattagtaagcatgttctttaagaaacaaacatgtaaataaaatgtgtttgctttggttatacggactttaccattaactaaaaactgatttctaacatctaaaagagttcatctacactgagtgtctgcgtctatggatgattgatcagggaagctgtggatgtgttggcatgaggcgtgattgggaatgacgtaaccttggtagagggccacaggcagaatgtggaggacacttgagggcactaacaaagtcaggagataggtgaaggaagggagaggaggaataccaaaaagtgactgtttcaaatttttgaacctaggaaatataggaaaatgtgttctttctcctcttccctttcctatcctccattgtgttgctgctgctttcacagcatatcttcttccagggccctgaaactcaaatcagtcccgtgaggccaatcattcgactacatgttggatttgtaagcctgccatgggctagtctgggacattgtttccagtggaaaattagttctgaatgtcaaacaatgtatttgccaacagatgcatatcataatttgttctggtaatggaaagacatagatatagaagtataggcatatttgtatgtatttatgtgtgtatgtgtgtttatgtatttatatagtatctgtattttgctaggtagtataattgtagctgtgtgtgtatatttaatatcatatatagtatatagatgtacgtacattatgtttgtgtgtatatatactcaatgtagagataggtataaatataaaattgctattgaatttactaggttctgaaatgatacaggctttgaatctcatgattgcacatatatggaaaggtgggcagtcacttatgatgtcagaaagagattcaacacgagagaagacacaccagtagctgagtgagaaaacatatcctgggagtggtagccctttattcttggaagagatgtaattaaagctgtaggcaattatgtttcctaaggtgtattttaattagctttcaaggaggaacaggtggtatcattgaaaactgtgggttcttttcaacattggttttccagtgttagcgcttttgcttcttacatacggcttttagataaatttttcttttcaatttcattctttcctttatttctcttgattaattaaatagattttaaatagataatataaattattcaaaatgatatatgtgtaattatgcagtagaaacaaaagaatcatagtatctaatatataaaatatgatttataagaaatgtttcaatattacatttaatctccttgttactgtactggattacattaaggattttaatgagattaatttgctttctggccaattgatcttttctctagtagacatgcagtgtgaaatataagatattggtaattagaattagtacatttgtgcatttgagaaatttttgttaaattgaaagctttgtaaggcacaaatgccatatttgctcaacagtcataagctatccaaagaagtagttgtaatgactagtggaagaagagctcagcaggcaggaacacagagggaatggagaacaaagctttctttggcagtggtctcagtcatggcaaatgtctcttgggagaaaacatcacatcactattcattctttcacctctgaatctcagtatctgttgtaaatatttatattctaaaccacatgtgtttttcctgcaacataattggtgaatcttttaaaagataatttagcaatttgaaagcaacattgcctcaggagttgaaggcgttctatgctgtctgacagtgcatcctgtgtaaaattgtagtttcatagatacccgcaagtggtgaaaggaaacttttgctgacatcattctctgagagagcaaagataatcacagtgaatatgaagtgatgaccatcaaggatcacacatttttctcataactgtgggaaagtttaggaattttgaagcagttttagaaataggaatttggagaacagttatttaaatatctgaatttccagatcagaaatcgtatcaagaggatgtgatttgctgaaattgcatgataatgaacaaactgctttgaagttgtgggatgatgctagatgagaatgcatcattttaggattccagaaattcagtaggaagcgactagtttctgcctctaaagatggaatcctttttataggctgttgaggctaatggttgctattcctgtactaccaccttccatttcttatcggtttccatcccaaccctctatgtacttcgaacagggtcatctgtttaactcagaaattcctgagattgtttttctgatttgcattgtgacatgaactgctctcgatattattggcacagtattattaatgcatatttgcatgaaacattktattctttaccaaagcattttattttaggttgtttaaatcaccctttctactactggaccctacttttaatccagagaataggttccaaaccatgccatcaattttatgttattagactggatataaatgtgttctgtgtttttatgtatctgtgrccaaaaatatgtcattttatacataagggagtttgttctatcaaaccattgcaaaacacagtgcctttcagaaacatttatactacaaaggttttggggaattggagttgataattatcctcctcttcgcttttggaatcttatcctatagaaagcaaatatgggccaaaatactgtatttcctttattattgagaagtattgattgttgactttggcaggactgtcttttgccctcgttaaacttgaattctggaatgccctgaaagtgaagggggctgggggagagaagactgaatcaagaagagacaagagagtatagattctctcatctccttagattatgacaaagtttttttaaaacttctattaaaagagcaaaccatgtaacagaaggaacataagtgtgatgtggtagatgttaacttttggaaaaccgtggttttgaaaaggtcaaatagttgacattaacttgactcagaacatttaatctaggactcccggggtcgtaaggacagtgagggtggtgtggagcctcgtgtgaaatgatgtctgaattggatttgaccttgttcactcctccttccctgtgcgctctaacaaggaagcagttttctggatgtttaatgcgttcaaaactttcaaaaatataactccaattttaaattcccatgtaaagttttgcctgtgttttattttcacacttcactgccgggattccaagctgtcacacagagaagctgtcagcagagatagcaggagagagagacacaagcagcctgcaggcctgcacccacaaagagcctcaacaccagcagaggctgagatacaaaaggcaccaagaccccccacagatcaaaataactgctgctgctttccccttcctctgattcatcaatcttagaactaaataaatgtgttgctcgcttcccaagtgagtccccgctgcttgtggtgcctgggtctgttaataatttagggagtactacagattgtcatggggaaatcagacattttgctattaaagtggtacttgatgttccactttatgccttgctggtttctgataataatctggctatcacattttttaaaacttttattttagtttcaggggtacatgtgcagattggttctatatagataaattgtgtgccacgggagtttggtgtacttattatttcatcactcagataatacctgattggtagttgtttgatcctcaccctcctcaccctccaccctcaattaggccctgttgtctcttgtttccttctttgtgtttgtgtgtactcaatgtttagctcccgtttataagtgagaacttgaggtgtttggttttccattcctgcgtgttagttcacttgggataatggcctcccactccatctgtgttactgcaaaggacattatctcattctttttcatagctgggtagtatttcctcatgtatatataccacagtgtatttatcctgtctactgttgatgaacatttaggttgattccgtgtctttgctattgtgaataatgctgtgataaatgtatgtgtgcatgcatccttacggctcccatgttttgattgttgagatttccagtttagaaattattaagtggaacctgaaaatcagttctgtgtttcagatctttaattttttattaaagtgcaacatcctttatggctatcttaggtatgcaagccatttaaaaatgccgtttgattatgtctttgtccattatggctttttataactaaatgaaacgattaatttccttaatattcactttattcgttcatttcattcaggcattcttttttacagacttattttgggtgcctactgtgtgccaagcactccgtttttttaacaacaacaaaatatagatgacaatgggccgggcacggtggctcacgcctgcagtcccagccctttgggaggccaaggcgggtggatcacctgaggtcaggagttcgagaccagcttgaccaaaatggagaaaccctgtctctactaaaaatacaaaaattagctgggcatggtggcgcatgcctgtaatcccagctactcgggaggctgaggcaggagaattgcttgaacccaggaggcagtggtggcggtgagccgagatcgcgccattgcactccagcctgggcaacaagagtgaaactccatcaaaaaacaaacaatcaaaacaaaaaaagaaacccacacaaaaatcaagtggatgtggtggcaggcacctgtaatcccagctactcaggaggctggggcatgagaattgcttgaacctgggcggcggaggttgtagtgagccgagatcacaccactgcaccacagcctggacaacacagcaaaactccatctaaaaaaaaaaaaaaaaaaaaaaatgaaaatgagctaatgtttggctgtgaattttggtgggtgtgatagatgagaaagctactrtaatggagggtaagctccttaaggtgggcttagggagttgtaagaagggaattcagatgaaggagcatctctcagcctcagagggttctgaaactgcttcatgaagaaggtgatgcttaaaggaggtctagaaagtgagctaggcaaacaaatgcatggagatttacatgccaggcaacagtcttaatatacaaaaaagtattaggagtaatgtcacttattcagggacctggagatagtttgctgtggttattgtataggtttgtatgaaaggcactcactattggtcaaaatgggatagaacgacggggctcaggtcataaatagacttacctgttagattctgagggttggagttgatcccgaaggtcagggaccaggagcacattgcagtatgtcacagagggaagtaatgatgggatatgttctttagaaaacatactctgacttcactatgaagagtgtatcagagtagggatgctactgtaaatatagataagttggaatgcttctaaaattgccctggttgtagaaggcaagagactgaatcagagtggggacggcaggggtggagacaaggtgatggagataagatctgtctaagatgttgaaggcgacgtgagatgatgggtccacaagcttagtaactggaatgttttgatgatgttgaaggaggcacagggcttcatcatgtcttggataggaacttgaggtattgagtgtgatggagggaataggattgccaggcgtgaggtttttttttttttttttttttttttgtgtgtgtgtgtgtgtgtatgtgtgcatatgtgtgtagtgtgtacctggaggtgggggtatgacataaagaaatacaggattacatagatttaggagggggaggagtggggtttttgcgtgagacaatacttacgttgaagctcatctattgattaatgaatctgtaatagtcaacatttattatacagctcactctgcaggatatgtgataaaacctttgtatttccatttcatagcaattccataaaataggtacaaaaatttccacccctcacacttgaggaactagaggcttagagagggcaacatcctcaaagacacataggggagaaaggttgggagccagatttcaaacccgggtggaatcaactgcggatctcaagcatgtaaacattatctcatgaggcttcccatatgtcccaagtgtatgcgacatccacttaatgctatctgcattggtgcttaaaataaagaaggtggatgttgacatgtatttactgaccacaggagagaaaacttaaaaggaaaaaaaaatataccctggttatttcttttgtaatttacaaggcttttaaaattcattggagattaaatgctatttgacagtatctagatttacagtaatgctcagaagtaggaggaccttggctagtttagtgaaggaagcaaaaaaaccccaaacaaacaaaaaacacatacaaaaaacaacccaatttggaaaatagtgaagtataagctcatttggaaatggactgtgaccttgtgaaatgagaagcatttttttcctctctgaatgtaccttaatcataatctagcccaggggagccaaacattttatatgttttaacaagctaagtgattttataaaagtgctgttagaaggatttattttaattggatgttaaaacatactggtcttaaatcacagctagtgccttacttagagctcttccaggttagctttcataagtaaagtagcagaactaattttttagccatcaaataatccttagtattggaattttacttatttttgcttgtattaacttcatgctttttttttttttttttttttttttttgagacagcgtcttgctctgccaccaggctggagtgcagtggcgcgatcccggctcactgcaacctccgcctcctgggttcaagcaattctcctgcctcagtctcctgagtgcctgggactacaggcgtgtgccaccacgcccagctaatttttgtgtttttagtagagacggggtttcaccatgttggccaggatggtctcaagctcttgactttgtgatctgcctgcctcggcctcgcaaagtgccgggattacaggcatgagccaaacttcaggctttttaaatgcttgaattgcacattcaaaataattttggatgcgtatatgtgtgtgtgtgtctatgtgattttttgttattcccatttcatatttatcacatctttattccgtcttagctccagcaatgtgacacagtgaagggaatagttttaccatattgcagtgggtctccacctggtggggaagttgtttcccagggaatatttggtaacgtttggagacgtttttggttgtcagaatagggggcaggatgtgctactggcatgtactgggtgggtgtcaggggtgctgctraacatcctgcaaggcacaggacagccccaatgtcaatagcacttataacaaatcatgcagcccccaatgtcaatagcaccaaagttgagaaacactacttcagtgcactcgttatgccaattgaacatacacaaatagagatattttccttagcagctaaattaaaaaatactggtgctgctttgcattcagaataagagaataaatatacgaggtcaagaaattagagggataaattaaaaatatagaaagagaaaaacataaatgagatacattaaggagaattaaaaatggaatagaaggaagaggcaaagtcatcttagtaaccattacccagctgtctgttatctggaaggcttaagagagtgtaaataagtggcagttgtgaggttcatattttcttttatagtaggaaaagtatatgctattactactgttattattaataatttatagagcatgaaaaatgtgttaagtgcagtgcagaatatagactcagtcaccacccagagggttttaagcttataattaggcagatggagccaactcaagcttaggatggggaaaataggtgacaacatgagaaagaggtcataacttgcttcaaattttgttttgtgcaatttctacttacgtttcagttaacctttagctgtgcgtatgtgtgtgttttcctttaaatggagacagccgctgtgtttcatagagaaaaatactttgagagatgatctgatattctcagagaaaaaaaaaaatcagctaatacaaattagcttgaaatatctatggtaagatgtgtaaggatatcttagtagaaaaaaaatcaagtgttttatgaaatacctaagttttgcaggtttgataagctcattttaatataggaaatggataggaggtttctgattcttttccatataaattttccagttacatttatttgctgtgtctactgtttttaattggcagaattgaaacagaaagattgagaggatttaggcctctaaaaatacacccccacatacccacccaccccccccacacagagtacaaaaattaagatgttggaaaatgaaggtatgttacatgttccttgctaactagggacattatatttaggtccttaactaaaaatttcataatcagttgccatttttatctgttcatctgaaaggaatactatttcagggacagtatgtgacatcatctatttgtgaagtggtgctttcctaagagtatttaataactggagatttgttcattagaggatattcaatttctaactttacaccctttttaatatttttaagaagtgaaatagcaaattaatgagtaattataagaaggtagagttaaatgtgtgttacaaggaaccctagcatgtcactattaatatctgtaacatcctgcccaaccctaataaagcacgaaagattacatttagacaaagttgaaggtctgaaatgaaaattttagtcaatatgttttgtagatatgtgtagtgtcaaattcttttggggaaaattaatgtctgtctcaggtgacttttccctttaatttgcatttggtatcatatgatgaaaacccatttgcataaactacttgaatctcattctgtttaattagagagcttctgtactaataaaattattttcacgtctcagcgaagaaatggatttaagaagatctagaggtaacttaaaccaagaaggttacatcaaaggttttattagtgttagattgacttcaaattgtcatgaacatgaacagtaaacaaccaaaaagatggtacaacacaaatagataatttaacacatgtatgaggagataatagccttaactggyaatttagtttgaatgaaaacttgtgaatgaaaacattttgtacccatgaatgtttatggactcgtgagatgtttacctttcctgatgaatatttgagtatgtatgtaaagaatgtatcttttccaacatttagttactccaatatctttgaaattgtccaagagagttttcaaaggattcaggacaaatagtgcaaagtataaaaatagggtcctttctagatacagttctttcatatggaaccacaagaaaggcacgcggcgtgttttctaaaagtcgtaagttgcagcttttgatgcagcagtctcttcaagcaataggtgtgtaaaaaataatttctggagatttctttttaggtctatgcctctttaaatgtgcccttttaggttactggaagtgaatgtatttccgtattcagtgtaggcatttctctgattcctacagataaaatatttggctaggtacatttttaaaaagtggacttttttttctaaactgctttacagtttagaaaatggattcaggaaaattctagcaataagttttaaaagtatacttacagcaataagctttaaaagtatctttaatatgttctgtatcctgggcgaactttcattcccttttgcttcttttaatttacatgatacatatttcctaccattgttacttttccccttttccaaaacaccttttcaagacttactaatttatatgccttccactctcattttactttagttgtattttaaattcatttagtgaatattagtttagggatgataccttgcatatatttttaaaaaattaaatgagaagtatcgcatcatttttctgcaaaattaagttgttcaaattttgggttattcgtttagaatacatttattttctattttgtctttattttgtttaattgtattcttcactttcctttttcaagctgatactctccaagcacactgtataggtagaaatggaatatacaagaatgtctctattgccacagtattaagtgaaggaaacatcctccccccacctccacatccacacacacaggctgtgtttgtcctcacactttcaagaaatttttgccttaattcttcaccacctacttcccttcaatctgtcttcctccggaaaaactcagctgctctctcaaatgtaccagtgatcctctctaactactgaaagaaatgtgcttttactgggtytcattctctgtcgcctctctgtagcatttcacatacccagtggtcatccacacccctagtcttagttcttcagtgctttggcaggtgacctattgtcttcttgctattggggcactgaatctctttttgtcatcctttcttttggaacactgtaaatgacatccatttctgtcaactgaatagatttttaaaaaacaaattttattatgcatatttaaagtttagaacgcgaaagtatgggatacttatagatatatagaaacatatagatagcatagtggttactgttgtgaagcagattaacatctgtcatctcacatattttagctgacaaaagcaggtaaaatctacttattagccagacacagaaagcaaaatattgcatgatctcacttacatgtagactataatccatacattcaagctgatatagctatagtaaccactgtttcattctctgtgtaatggatgtaatacacagagatacagaatgaaacagtggttactacaggtcaggggagggaaaggaaatgggagatataggtcaagaggatacaaaatagcagatatataggacgaacaagtctaaatatctaatgtaccacataatgcctaaagttaatacagttgtgtcttattagggattttcgttaaataagtagatctttttctgatgccttttcctcctgcccaagtcaaggggttagagaagaaaaccatgggttcaaagagtgaactgtccctctgttagtgagctgagtgatttttgataatttactcacttgtcttacttgatgaattaaaaaaaaaaaaagaggcagaaaacaccgacccctataatctttctctttagcaatctgaacttctttggcacaagtaggagaggagagagaaagcaggacatcatttcacagggacttgcaaagttcttgcttgatatttgattaacttcccactcctccttcctacagtactgctcactctctagcttcaaaccttcacaggctctacattattcataacctccacgttattcataacctctatgacttcttttaactggcattccaggtgacccaccttgtgactccagcctacttttcctggattatcactcacttggttcttggacaaacctatttctctactcttactcttctaatttactgtatcctaaaaggtccttgtctctctttgaaacttccagatttgcatgagttggggtttccacgacttctccttgaggtgacttggatagcacagcagcctatttccttccactaaccttggtgtctttttatatgggagaatggaaaatactagggacttcctccagcccccaacccaaactctagggatgggatttcccacatccttctccctggtacacctcaccactgtctgtctgtctttctggtatggactgcatattgggtcttataccctcagaaatctctatagcagaagtgagcgccagtctctctgctcaggtctaccccagccttcaggagatacatggtaagaaacttcttttctccatagtggagggggagtaaaacarataagatgccatattcctgagctctctggaagctctccttgaaattcaccccgctaccctctagtaacagtaccagagtggggctgtgtgcatccaaccaaggaataagaggccactgtctgcctacatgcatccctaatcttytgagtgctgattttgaaacctcatcactttggggcaaggagtacctccctcccctttcccatagagaggagagagaattgagtcttctctctctccgctgaactccccacaaagctgttcagtgctcctctttgatcctcttcttgtgacagctggggaaggggtggacaggctgaggggaggtacttgtagcaggatctgctctggtatattttggtctgagctcaaggtatgtaattgttcccacaagcttctggcttgctcactgcaagctatctctaacttttggaatactttgcactttttgttctcaatttcagattgtagacacaattttgagactaagaaaatccctcttggaattctattatagtaaagattcgagttttaattgaaagacagttatgaatcacttaacacagtgcatatacattgcaattttccaaatatttttcactatttttattgttttcggcctgcattttttcttctagtagtaatttcaccatctctttatataattgacattttaaacaagtaaatcgtctagtctttgttttgatgcagtctcttagtattacagttaagattaaaaatcagaaattatcttattctatgtaagatggtactttctggaacgctttgccatacagtttggcttaatcttgcagttgcctgaaagaggaagcacatggaaaactgtggtgaacatatgtgtctccatgtatctatctgcatgtaattagaatgaaacctgtcgagtttggctgagtttgcaaattgaatattcacctaatttgatctattttttgaacatctaattaaagcctcttttaggttagaagaataattatgatgataaagaatagattttactacaaagaataaatgagcatgtggctttcttcagacctagtacctctttaggtagcatgacactgttcttggtgttgcttacattgagtaaaatggtgctaaaagagtcagttaccactggaatttctttccagggtgatatatttttacactagcacaacatggtagccagtggtcattgggtatcttcacttttgcaaaaaattaaaagtgaccaacttaaccccatgatttatagtttattttctaattagtgatctgtatattttatttcttcttagtttttattttatttttattattttttactgggcaacttctcaagccagaataggctcagagagactccctattttcttaattttcttactgaaactgcattaattgcctgtagaatcagggtaattatgatacaggttgagtatttcttatctgaaatgatcgggaccaaaagtgtttcagattttggatttttattttattttatttttttattttggaatatttgcatatacataatgagatatcttggggatgggacccaagtctaaacacaaaattcatttatattttatatttacctttcatttatatttcatgtatgtgaaatttcatataaaattcatttatattttatatgtcttatatgcattgcacagagataattttatgcaatcttttaaataagtttgtgcatgaaatgaagtttctgttaagtacttagatgtggaatttttcactttcggtgtcatgtcagtgctcaaaaagttttggattttgaaacattttggatttcagatttttggtttagggaagcttaaccagtacatgaggatatgttgaactggttggatttaagaaacaagatggaaaaaaaattgaattttctggttttgttttatttatttatttagagacgacgttttgctcttgttgcccaggctggagtgcaatggcatgatctcggctcactgcaacttctgcgtcccgtgttcaagcgatactcctgcctcagcctcccaagtagctgggattacaggcgcccaccacaacgcccagctaatttttgtatttttagtagagatggggtttcgccatgttggccaggctggtcttgaactcctgacttcaggtcatctgcccgcctcagcctcctaaagtgttgggattataggcgtgagccatggcgcctggccttctggttttgtttcaaactggccctccaaattccctttatttttgtgtataattatattaaataacattgttatagataatgtgcatacacaagccacaatgcttgtgtcttgttagagataatgtatgtacacaagacacaatgcttgtgctagtgtgaaaatattaagtttttagtcgtacatcagtttgagaaggcggaggtcatggatggccaaagtgatatgtattgttgaatccaggtggtgtagcattcactcgagggggcagttatgttctgctagatgtctgcagaaaactcacaggacattcattatactggaaactactgggatgtagaaataatagagtttagtgtgttgtacaattttgtctcctgttatcaaatgagtcacctagaagtttgcagatctattggctagaggagtgcatgtattttctcttccaattgtcttagaacaaatttttagatattgagaaaaaggtagtttctgtgaaaggagagtatttggcttcaattttattgctagaattttatgaggcagtgacacctataagggctttctgatatgaagccatacgaattccattcagattatggctttcatttttaaactatcttctctttttttccctttcacataagatttttatggattatcccaggaaaataacagaaatagaaagaatagtaagcagatctctaactattccttctgaacaaaccatttcattttatcctgcattgaatgttgacttaacacttaaaatatttgaaatgaatcataatcagcattttagttgtaggttcttgttctagtatgtttaatgatttgctcaaatgttgacacttttctacagcaggggaaaaaaatcttcaatttaaattgttggatttttcaaccwgggcctttagtataaaaatatggacaaaatagcatattcttttacaatacaaagctgtaaatgctgatagttttaaatataaagtgattttcattcagaaaaaaaaaaaacagttatgaaacgcctaaatgtgcagtaataattacggggaaataattgttcagttctttagttaacacactttatttcattggaacactttgaattaataaacatacccatgcatttttttgtgacagtagtaaccacagtgtatcttatcagataattaactttcacaaacataataacaagtctaaggagtagcaatgacactgttacagtaaagtatttctttggatattgaatttttaaaagaactgcttaaattcaagyttcttccttcttgcaaagggactgtgacttttgttactatgtgtcatgcaggggcatttctgtgaagagaaataaaagtggggtgaagggaaataatagagaaaaagacaataggaaaagcaggaaaacagatttggcagtaagtgtatacaggtattatgaaaagtaacatcacaactctggattagatgggtagaatgaatgtctaataatatctgtattgatctttaattagggtaagtgacttaacagttgagcttttctttctaattcaggtaagctgtcctcctctcagtagctgttcaaaggatcagctcatggaaaacaaaaacaaaaaaccctgccttttaattcttttctctgttttgaagtaattacattaaaagcaagctccagataatacagtttcaagtggacatcatgctactccccagtgcaatgcagccaagtctacagaggggaagggctgcctacagtggttgtcagaacagctgggagagtattaagacctgctgcattttcgtggggacacaatggctagcttaatatttgtttctgtttttcatagcaatttgacacatttgaaacaaataaacaaaatcttacttttgattaaaaactgcttgtgaaagaaccacaccctccctccaaaaaaattcgaactcagtttttgagaatgagcgaacatattttttttttgctgctttacttttattgctgtagtttgacaaaatcaaggtgcattctctgatagattttagtgttctgctaagaaagcatgaagtattttgcattctatcactcaattgtgtgtagttggtgaacatttcccagactgtgccaattgaattaggtcttcagtgtactgttattgttwgaagttgaatggttaattcttcccttcttaagctgaagtgtacctttctgtgataaaacmatgggactcaagagattgcatttaaaacttggtgaaaaactgaaaaatttatttatctttgtatatgaatatgactggggaaatattttaaagcagcttctggctgtatgcaggaatagtgtagtgtggggatatatacaatgtgagtcattactgtgtctcagcaaacatgcatttaagaggattatataccataaacaccagagctatctggaagtatatgagctggtggtctctgctcactaggaaagtatagattgactggcaggtgtaactttcatgccacttggctgatctatcacattggagggagtactatataaaggcttgtttttccatgcttcttggtgtgcagtttgatatcagggatgggtgcttgccttgtatttgtacccatagtgcttaaacaacaatttgcctttattgaagaaaagattggcagcatctacacacttgtgttctctataggaaaatgtccgtattcactaagaaaattttgaaccttgatggtcacggttaatatgattcagaagagttgatagatacacatgatggtgatgagaaatgagaaggaatatgatgcttggtcatttttttaaaggcttattaagagaagattctgatatgaatcttgaatggatttatttgatgataggtgtaaacgtttgcatatcttcaagtttctagtgaaagtttggagaggatgaagagccaattggttttgcactgtgttgtagtgttcagtctccagatgatgttggttaaaataaaagttaatatcctctcgacatggtagagataatgaaaagactgcaggaaatatttttccatgacatccggaaagatctgtaagcagtgtgaaatatcagagatcgtcttgggaaacacagtgatttaaaaaacattttccgccaattatttaagcttgcttttttttttttaatgcactttgaagacttaattggtaatatctacactttaattaatcatttttgtgatttcatttaagcaaatatagtaccatcatgtttcaaatatactattaaaggctgggcacagtggctcacacctgtaatcccaacattttgggaggccgaggcgggcagatcatttgaggtcaggagttggagaccagcctgaccaacatggtaaaactccatctctaataaaatacaaaaattagccgggtgtggtggtaggtgcctgtaaccccagctacttggggaggctgaggcaggagaatcacttgaacccagaaggcgtaggttgcagtgagccaagatcgcaccactgcactccagcctgggcaacagagtgagactgcctcccaataaataaataacaacaacaaaaatacactattaaaatcctcaatcacagctatgcttttacaatcacatgcagaacaaaatttcccacctaacattcagtgacagtgatatwtttttttttagtttggtaaataaaaagttaaccaaaattttaattttcttaatagtagctttttccttgtgagtcttttaccttgtggacccagaattaaaaaaaaaaaaagccaattatctcaatactagtttcgttttggaaagaaaaaaaacaagattcttgggtgttccattcctcaaacatgtttgaaaaatattctcctcattataagaagtatattatttaaaaaattagctttcaatcaaaagaccagttggaagagtcagtttcaaaagctcaattccaaatagtttttatttgataaaataaaaagtattkgactttttataccaggttttatcattgctaacagactaattattctgagaagtttagagttatccaagtgtatgaaaacaaaacctttttatttgtatattccagacaccaggaattccttccctggtgtgtctctactgactttagataatatgcttagcatttaacttttatatacatatgtagaaagaggtttcctttaagataatcatcataaaaaggtaaatgtgtgtgccacagaaccaaaatttaaaacagttgttttcagaaatgaatttgcaaaatggaaaaaaaatatccattttagtacgggataaaagtttgagaatcacaaattcagatgcttacagggtccagataaaagtgaaaaaatggtcctgatttgagggaaaggcagtagggagtattggggcctatggtgaattggtgagtctatgctactgggatgaacaagtaggaagtgaaacccttgtgagggttaggtttggaggttggagaaaagccagaggatgaaaatttccatttttcctaggctgtatcagagccctgaagagttgtctacaattagacaacaggtgtgggctacagatagactatagttgtatgtcatctcttccctgttgtacccagaccataccatgaacataaccagcagcagagatgcttccttgtctcttgatcccaagattggtgttcttcctcaagcattctcttgtcatcctgttcttggagtctgacctttgtttgtttgtttgtttgtttgtttgttttccaacatagcagtgaccccgtttccccagtaacaaatgtagggaccgattttgatcttccttttgagagtttgaacctcggtgctcttcatatacatttatgtaattaaacatgcagttgtgacttggttgtctctcacttatgtaaaatacatcaaatcctcataagttattgttcttctgtaggttttgaaaagctctatgaaaaacaaaacaaaaaaaagttggctctggtggtatgcatatggagtcccagccactcaggaggctgagggtagaagatcacttgaacccggaggtttaagaccagcctgggcaacgtagcaaggctttacctgtagaatgaatgagtgaatgaatgaatgaatgggtaaataaataaataaatagatccgtgttgtagaccaaatacttaattagctgtccctttcaatatttagtgaaatgtacaaaatgctatgaagttttagaattaaccaggaggagatttttcatttttactttactataactgcataggtcacaagcactcaataagtgtcaatggttggagaaataaaacacaaacacagaaataactgtgaaagtataaatcaacattcttatcttgcttttctcagcatatggcagagtaatagtagaatataattgctgatggtattgcaattttttgttttctgctttcatgcacaaaatttttaaacgttagtgaaaaggaacaagtgttgtaaaattacagctattcttacctgtgttaaacttttaaagtgaactttttatttctttgtaaacattttatattctaacacttttattgttcctagacattaaaatttccctttggaatacaaagtcattttttctatatgtcaggcatagtactgccttgatactagatgtggaaatgcccccactataaatacaaccttctgctataattggtaatgagaaataagagactgattttgaatacttgacaatgcaatttagaacagtgaatcatattcctgggctgaactgtgtattgaccatgatgaagaggcgatttctcctttaggattttctctgaccattataataaggtttgattctttttagtgtcctcaggccaggtagatctttatgtccagagcatttttgtctcttcagcttgtaagggtctggcatatgaaaaagagcagggtatttatagatacaatatctgaacttgggactgttctataaccagaaaaatgtctgattttgagaacaataagcctcagattcatcatctgcaaaagggaaatgatacaagctctttcatagccagagtgagtgcaagtgtttgtgtgtgtgtgtgtctcagttaaatgataaatctcatgtgattttctgaggtctgagatgccatatgaaggttagtttttagggagtcatattgctcactgttactgctatccaggacaactgtcaggttgtggaaggtcctgtaagttgatggaaggaatgaaatttaaaaaggtaaagagtaagtggaaagtcaagagtccttgtatataaaaccttacttctttgaggtttgctttttgattgctctgcctgatacaatatagggcttagcaggaccaaatgcagagtatgtgaagtcattgcagaagaaagaacaagtccagtttagtttgtggtttcagaggtggaatcatggcagtctgccagggtcaaaaggagaagttcactgaggggctgggagccagctggggaggatcctggaggcataactgaaaatgggagccaaagatcagtaaccaataaagcagactcagtaataggagacaggaatgtgagaaacagtgttttttatgactccaactaatttgsataagtgttatctttttgaatgcatctgacccagtcatctgccaccagtgggcttaaccctcaaagcactgttacgaacggagccacacagaatcaaaagcggaaaaggaaaacaaataatacatgcaagtcctataacctttaaatatttgtgatggtaaaaaataaatccctgttacgtgtatggctattattgcttagcttagattattgattcttctataggatatgtgcctgtgtaagacaagagcatgtacatgctatatttcagaaagatttcaaccaaatrtggttaatatttggggaaactgaggtgggtatgtttgctttttgggaaaataatttctgaaaaacacatttgcaattcattaggaagtggtaatgactatgttacacatttttgtacctgaggaacagagggtgtctccaccaatttggatgaagttgttttgaacaattctttttcttataataggtatgatattgcattatcttttgaaccagtctctctctctctctctacatttattcttcattggtgaataattcctttacactgccatgataatattctttctctagatcaaatatcatcattgaagaggaatgattctaataatttagagaacgttgatattaattgtagtgacatctaaaaccataggtagaaaatttttaaatttggaatcyttctttattctcaaacagatccctgtaaaatgatgaaatggctgtgaacagccccatatttgctttaaggatttccttccttttctatttgccccaatcaattacttctgtaccctcttcttggtccaagaccccacagatgggaatccactctactggtatttaaactttagatagcttgttacttcagaacatggtgtaaaataagttagaagtgatagaaaccttcaaagatatattcctggatggagagggttagaaacctttcctcttgactggtttttatttagtagtagtatttgaaaatactgatggtcatggtgataacaacaggttggaatctggaggactcttgatgggatagtgtaatattttggctcataaaatatggaattgttgccttgtcttaaatcagttttcagctggaacattttgtgacttctctggcatggtagccaccatctggccaacacagtctcctgagattcttgcagccaaagtgtctcagcattcacttgaagaaattcattttaaaaatgtctccaaatcctcaaggaccatggctagcaaaaatgtggatatgcatctgagaggcataattatcatgcccctctcattcagaaatgttctgcttcaaaggaatggcacagtgtccttcttgattttgtcactttttttttttccagttacttcttttgacattgttgaaggatgagaataagttcaaggcttcctaaggatgaaggaagcaaagggcctgcggcaaaaatataatcatgaacgattagaggagatgctatgtaaaaattggcactaaagctggattttggagcctcattagcattttagttaattgtctagatatccattgcaattgtatttatttatgttggtcattttatatatcagggattccgtatcaaggaaatgtagtattccagccttcttgaaggaaatactctacaatggtagaaatagataccgcctcatcctttgtagctagggtagtgtttccatctagatacaaaaaaaggacaaaaaaaggagaatttctgacttgtcttcacctttttttttttttttttccaaatgtgcttttatctagatgctgcacaaaattgcaaaactaattatggggccaaattcatattattttgtggatctctgaggatacgtatgararaatctagtcctcttggaggaaatactgaaatcattttttaaaaatagacatattggctactggtactaataraaaaatatctttcttgatagttaacttattaaaaactgctcattgaagctctcaatatgtcctttgtgggaaaaattgccttaatgggaaaggtcagaacaatttaataggacacaatgtgagttctgagagggactcacagtggttctcatatagcacttgttaatttaccaaatattgaacatttattgcaactagtagtaaggattttaaaaattaaattgctatttacatataaacttccataataataggcttaagaaaacatcagtcctttatagagctcctttaattcccataaaatctgttatacatgttatctgtgggtgttcactgctattgtaattaggcaacatgttagggtccaaataagctgaaaagaatcagtttaacttctacattttctgcattattctctcaattcagttatttcggggagagataaaagaacaaagcatattctctgtacatcattaattaaaaagacaagcaatattttgctgctaagatttttggccaagcccaaataaatttgtkaaatccagaaaaaataatttgataatttattataaagtattacaaaaggatgtaaaacattattataagaaataatttgaaatgaaatctaaattgttatgatcatggaaataagtcagtttagttagatagacttttagtgagagactactgtgtgcctttaaaaaaaacccatgtgccaatttctgcagaggatataaaacttagacttagtaaaatgtatgctttccttagtaccattcaggacataggcacgggcaaagatttcatgatgaataccccaaaaacaattgcaacaaaagcaaaaattgatgaatgggatctaattaaactaaagagcacagcaaaagaaactattatccagactgaacggataacctacagaacgggagaaaattttttcaacgtattcatctgacagatatctaatatccagactctacaaggaaattaaacaaatttacaagaagaaaaaaccactattaaaaagtgggcaggccgggcacggtggctcacgcctgtaatcccagcactttggggggccaaggtgggtgaatagcctgaggtcaggagttcgagaccagcctggccaacatagtgaaaccctgtctctactaaaagtacaaaaaattaggtgggtatggtggtgggtgcctgtaattccagctactcaggaggctgaggcaagagaatcacttgaacccgggaggcagaggttgcagtgagccaagattgcaccattgcactccagcctgggcagcaagagtgaaactctgtctcaaaaaaaaaaaaaaaaaaaagtgggcaaaagacatgaacagacacttctcaaaagaagacatacatgtgaccaacaaacatatgaaagaaaagctctgcatcactgatcattagagaaatgcaaatcaaaaccataatgagctaccatccctcgccagtcagattggtaattattaagtttatatttcttaaaattaataattcataaactttcatctttacaacttactattggtaatgtgataatttctgtgatgtaaagctatgtgatttcagggtgttccagttttcttgtacagtgacaggttgtaacactctttgaatttatgacatatcagctagtttgtcactgacatcctcatctaaggaactggatgagttaataaagtgagcagtagggagtattcccagaaacctttcctataccggaaggccagtaataatttaactgtgaaccatataaagatattctgctaaatccaaaacaaatatatttcaattcagcttccctagctggaccctgcaaaatttcctgtagctttctaacaccactgtgtgtgaaggtaaataagagtggccttcaaatgcttgggagggaaatacctcactattacaaattgtataatgtatttgaccatgccagtgtgacgtgtggtacctatgcaaggaaagggtcctgaagctgaagcttcctaaggtcaaggtaaatctacttctggccatgagagaggccaaacagtgatacatgagttcagagcccttagaaatgatattcgattggggattagaaaagatttcacccaggagaaggcatttgagatggctctgaaagtggaatcagctttcaagaagcaggtgttttagtgaaaatatttttgaataatggaatagtcttaacaaatacacaaaaaggttgtaaaattttagtatgctaaaagatcatctggaggagacatttgtgacacaaattcccaggccttactgtgccattctgattcaggatctggtctcagagaatatgcatctttaacaagtaacaacaggtgattcagttgtggggggctgttgggcagtattttgaaataaaaatgttaaaaaatgtttttttcataaaaggctaggagtctgatttgtttatgaatagtgagagttgatgctatctcgggtaaattagagatgtaaaaagtcttgtctgataggtttagcaaattctttgaacaggactttctcttctgcactaagtaggcaatagtagcgaaccatggaagattctcgaacaaggtcatggcctgattgcaactgcacgtttcttggatagcactgtctatttaatggtttgggtgagtttggaaagaccagaagtaagaataagcaagtgctgccaaagatacagtaatataaaagaaaagggtgaaggagatattaaaaaaagaaaaaaaaaaaaagcaagtgggaatggttgagagagtcatgctctagggaatataaaaaatagaaagattgtgaaaaagttcatatatgtggcatttccaggggctctgctggtgattgaaatatatttgttcattaattactgactttttcaaagctttatgtttaaatctcctttatgtttttctatacacaccttcatattcatattgttgtttaaaatttgaagttcagatgttaaagatctaaagttggtaaaatgaggcacactatttccagaaaatgctttttattattcaggggtgaaggaccactgtgaatttaaaaacaaattatgttgttgcagctttgctctttttaacccctaagttacaataaattctggccacaaaacaagacacatcagcctttctgcgatcaaactatgaattctacttacaattataaaacacatttccccaaagaggcaggggaggaaagcagaagttgtatttgttgattatttaggtgccttagagaagtatcacatgtgaaacctgcttacataggaaaccttccatgtctttttggataaccagagagttgagtactttatcaactaggctggattgccactttgtgaagactatcctctcatctttcctatttttttaactatttaatttttttgaatcgttgattgcttgttgttaatctaattccaattacatttacaagttatgtttaggaatcttgaatgaattcctattatcctacgttttagtatgtgaaattgtttttcttatgaaaaaaacaatcttgctagaaagattgatgaagatgctacagggaaagtctaacagaaaaaaagagctaataatatcacatattagggtcaacttgagaagctagtacagttctggcaagttaatggtcttgaacaatattgccttcctaatgactaaaatccaaggataaataaatacataggaagggaaaccaattactgtagtcatgtattaagtttattttttaccaaaaataattattggttgtttcacttaggtaatttttctttattataacccttaatgcttatgaaaaattgaaaatacatttaagtttctggcagtttgaatttgacagagggaatataatctttgtatgtatcttttttacactggcttacatgtatatataatgattatatagctttgtcaataaaagcataagtaggtgcctaattcataagtatttctttttcttgtattttggctttaaccaaatatgctcatatgtacagggtatatgcttaaatcttatgaactcgtcgtttactccataaactttagtggaagcatgatccttggtgagcgttgtaatatcggaggagtacccactacatatcatgccttttgttggctcacagtctagcagaagagagagaagatgaacacttataagctaggtgaaatgtgcagaaattaaaatatttaaatggaatagagcagtaccaagtagggggtagttgactatgtttggaggcatctgagctagggtgaccaaccatcctgtggtttcttgagatacagtcagtagttttggtgctaaaacttaggatgttttcccaggagacatttgataatgttagattgtcacaactggtagctaggatgttagtgttatctattgggtagaagccagggatgttgctcaatctcttgcaatgcacaggacaggctctacaacaaagaatagtctgacccaaaatgtcagtagtgaaaggccctgttttaaggggaagtagctgttaaagaggaagagagtgaaggtgctgattatgtagggagatgggacaattgatgcaccaaggttcctagggcatggcgaagaggtggatcaagagcacaagtgaagcaattggtcttsaataagataaagggaaaaatggtttctaagttagaaattcgtatacagtgaataggatgtgacttgccatcaagttcatgtttgatggcattattttatctgttgatgtaggaggcaaaagcatcgatctcttggaggtgagaggtcagtgcagtgctgattgctggagagtagtgaagggtgggaggttgattgatagatgacagaggggtatagttgaggctgtagatcatgaatttgcaacggtactagcccttacagtgttgtgatttctcaggcaaagcttagccattcagaacagactggggattcttaagggaaaggaactgtgtggaaatatactaaagggttcaggaccactggtgggagctgtttgactgtttggaacatgggatgggtagtgaaggatggcagaacctttatattgaccctttaaaaaaataatgactatattaccgaatgctttgtatgtaatccagtctaagtaaaagtataactgtgttgttttgcaatttctaaacactgtttttgtctttccctgtagtttactttgacttggaaagatgctctggcagcccccagaggccatttatgtagcgaattggagtaactaatagatatttaattattaactgcagcccatccctttagatttctcttttgtctttttccctctgaaacaacagccctgaaaggagatctactttcatggcatttttagatccatctcaaaaggcagcttttactctgtctaggttaccaaaaaacttcagacagtaaaattgaacaaaggtgctacagagagctttaaagcacctttcctttcattaaattagtgactatgactgggttatataaagatggagggaaagaagcagcatgtatcactcaacttttgagatcccagaggctttatctttacatttggtatggaataaaggcttatctcacaataacctgcagaccccttttctaattctctaagattaaattcatctagaatctcatgtgtgtgacctggcatacattcccaaatgcttctgttactcaaatacaagaaagcattttcttcttatcatcatgatctgtggacactaaaaaaacacttgggatcttgtatctaacactcaagtacttgggattacacattcatattttagagtggtgcaaaaaggccaatgttattatacaagtggaatccctagtatttataacagtatttttagcttctaaagctaagtccaacctgggaggaggtcctaaaatggtgtcattctgttgtagccagcataacctggtcagtgcagctctgttggatgaaaagcattgctacagcatgtcttagtctggcaagaggcttgggtatctgcaaatgtgttctaaggatagcagggggctgggcccatcagctgtcagccacagcttctgtttatgctgtgaacaatagccgtgtgccagggcagtaattattggttgattttccttctaaaataagtgtcctaataatttgtcacaaaaccaacttaaattgctatgatgttgcctgcaatagttaaattaggggaaaaagagaaaaaaggaaaaagaaaaatccaccaccagaagtgtttcagtttatttcggcatgcattctatattggtaaatagtgtcattaaaatctcatttgaaggtttttcaaaaagtttatttctgtgtgggaaaatcctttgttttcttacctaataccctgagctgtaaattagaggacaggggaaaaagttagctggcaaataaaggtccttactgtctgtgcttctttggaaagcctcccatattcctggggctcagataatgtgtttctctagaaaagcrtgcataatcggcactgaaatgagctgctaccagggtctgcactgcctggggatacaaattagggacttgatatttgaaaagtaatccaactgaaaattgtttcaagaatattcgtgtagtgttaccttgtgtctatagtgccaagtgttatccaagttctcttaccaggagaggtgaaatgcatattcatgttcacaaatttaatgccatttggaaaaaggtaacaaaaagattggccaaaacataacagatttcggtgagggagaaaaaacggcccttccccctctttgagttgattttttaaatttgtagtgtgtatgtgtttcagttcacagaaggcaagaatgaaacattttctcctcagatttaaaatgctgtcatggaaatgttgatagagttattttacagagatgtagctgggaaggaaaaaaagcaaaagaactacattactgcattacactgtgttccatctagaactcattttattaaagttcttcatgggtttatttccatctacaaaccaaggaatcgtaccctagcctctatccgtgtgccaggttccgattaacatcaatttgagttctctgtgtggacagagttagttcatggccttgggttatcatctattattatcactgcttgcttgtacatgccttcagagcccgagcatagaaccagttgtcatgctttccatcttttgtacccccaaatagctcactcaggagaatttgtgaatgggcggggccactgtgtgaaaatgcagagatccatcgtggttagcaagattaaacgtggggagacatctgcagaacgcttttctcataatcatcttgcatatatgaatatagattctttctcttcactctaaaaaagaatttggatatttgtgtagaaaagatggacttaatatgtaaaataaataccgtttggtttcttgctacatgtgctcaattggaagtataccagaaaataagaattttaatatcctacaaaatgttattggttctaatggttacctgatactgaatgagaatatttggaagcctgcaaatcattgccaaatacttttcagcttagagctttgggtctgcagagaaatgaattaaaaaaaaaaaaagaatgctaaatttagtgaaaaatatctggaagggacatagacacatacctaaaatttccataggaccaaaaataattatacttactttaaaaggtattgaatgcctacaacatgttaggtattgcacaaaataaaactgacatgaaccttataaacttagaatatgatctctgtcagggtattggtctaaatgtgaataatgctgggcatttttcagtatattttttaagtcactgtttcatttgcaaaaacactggtgtataggcaagtcaactttattttttactttgccttttatgtttcccgttgtttatccatcacgtatccactttttttttttttttttttggaggcggagttttttgctctttttgcccaggctggagtgcaatgacacgatctcggctcaccgcaacctctgcctcccaggttcaagcgattctcctgcctcagcctcccgagcagctgggattacaggcatgtgccactgtgcctaattttgtatttttagtagagacagagtttctccatgttggtcaggctggtctcaaactcctaacctcaggtgatccacccacctcagcctcccaaagtgctgggattacaggcgtgagccaccgtgcccgtccacatatccacattcttattaataagttgcccttgctgagtgtgggctcatgcctgtaatcccagcactttgggagactgaggccggaggatcacttgagcccaggaatttgagaccagtctgagcaacatagctagaccccatctctacaaaacattttaaaaatagcatggtgttgtggcatgtgcccatagtcctcgctgctcgggagtttgagctgggaggatggcttgagcccaggaggtggaggctgcagtgaaccatgattatgcaactgcagtccagcctaggcaacagagtaaaaccctgtctcaacaaaaaaacaaattaaaacattaaaaaaatagcccttaaagtaaaatgttgcgtaccaagaaaatatttttaaatagccaaatatttaagcatcttatcattggaatcatctaatattttaaaagtcataatatttagaagttaatattaattatagactttccttaggaaatatgtattgtaaaactctattctataattaatctttgtaataaaaactcaggcaaatcactttccattgtattttgtgctacatgaaacatttttgttatgtatcaaaattgtgtatctataaaaatgtttttttgtttacaaagatttcttataatacacttctacatttctccagtaaatacaatcaaacatcattttaaatctgttttattactcattgaaagtgtctgcatgtgtacacacacgtctcccttctgtgttatagctactttggggatatagtagctactttcacttcccaaagtatcttgccaacttaaccagtgtgcarttgatagatgagaagttgtggtcagcttatcctgtaagatggatctatcttaaaagaaatggtctatgtttttgtaagttgtggtaataactcactttggttggaaggcaagcgttacaaaaattcatattggctcaaagcctttcagctcatacagtgacaccagcagatcttctctttgtggaactggtttactactgtttctaaagtgaagctagtacagttcatcacactagttcctcttaaaaattcatgtagttgatacactggaaatattgtatagaagaagtggcaggatattctggagtttggcaacataaaattgggaaagatggcattgttctttatttttctctttctttcccacttcagttttatccgctctcatgttccttttcaaataagccagttacctttcctgtgtgacccaatttgcaggtacatgataagcagcaggttagaatagagaataaatgattatttttaatgatgatcagcacatctaatgtgataaattatgattaatgagtaaattagcagtggatgatgtaaatgaatctgctttgaaaactaactctacaaaaagatgctaaagcattggtagaggttctttttggtcaaatagtgtgtctatattaaatggcttcctgagtatgttaccacttaaaggaaatatgaaaaaagctgataagcattgtgtcatttgcctacatctctgctgaatgagcctgggagattgtatgtaatgcataactttctcatctgtttcagtataagggccttttatcactctattgaacaaaacggatgcacagtctgagtattttgaatgcataaataggtagtaagcaaatctagaggcttaatgtggaagatgttaagtgaatgtctaaatggtgttgctgataacatgttttcattaagaatgcatgactatggcataaggaatggtaagaatgacttcacagattttgtctatgagtgattcaaaaccacttaggccatcttcttgaaatttatgtcactaaaccagtggttattttgagtgtcttacaccaaaacagaatggccagccttactaagcacatcaatagttcaggaagttttattgcccgggcacacagaatgtaggtgattgtttttgtcataatatcccatgactgtttattaaataaaaagttatgatggtgagatcatacagttttcgttgctgtaaaacacgtgtttatgatccaggtattattataccttgaattatgacaaatttccctcaaacattggaacataccatttccacttttctgctctgacccacgttatggtcttcatgcatgtgtattgtcctgttgtaatgcgtgtgcttgtgttgtgaatagcagaagctgggattgcatgctgttctggaatgtgaaataatcccaggtgagatcagagatgttgaaggcaactggcagggaagtcccatggtggcaactggaatggaggaatgggtatgatgcgagagctagaaggttggtcagctgtgctaatggtctacgaacatttactggttgcttagtttgtatgtagacattgtgccaaatgtttgcaattcattattttggacagtggataaaaatayggccaatgataaagtattaagttatagctttagcagtggtctaggtaattggacattctgacacattgctgctatgaatatatgaattattttaaaagtataatttgttaaatatatcaaaagccttaaaaatatacttttttgaattcagtaattttayatgtaggartaattcacatataggaattacatatatgtgcaaagatatgattacaaaaaagttttgargtctttttctgattgaaatagcagaaacaacctaaatgtttaacaataaatttaaatgtaatctttactctttataatataaacatgatgaatttatttgtggtcataaaagatattcacagtatattctaaatgaaacgttggttacaaaataatggtacgatataacctctttcttgttaaaaaatatgtaaaataagcatggaaaattcttaaaagttattcatcaaggtgatcaccattagaatatctcctttcaactcatgtacattttctaatttataataaatacgtacaattagaagagtaaagtcattttacttaaaaattaaaaacacaaaaggtggtagaggggaagagagctctgtgatgacaatgaggtggaatgatattcataaaagagaaaagactcatcacgttatattatgcttcatctaaacttcagtcctatgatgatacacatgaatctgtaatctggctgtgctacatttgccagcttagggcttcgcatggatctattcgtctctcactatgtcatatcaatgtattgcagtggcaaggtatgtcacatagactttgtattccatagctaattcgccaaactataaacaaatatacgtgtaatagaggtgcaaagatcacatttacgatattattatccgtcctaaatactcaaaagtgtatagtccaggattaggggatagtatctgggacagcctttaccaagctcatgtatgcattgaaactatgtgctgggtatggttgggagttataagacttcatagatgaccaggggcatgtataattttctcaaggttctatgaatgtgaaaggggagaaaacacatgtgcttaaaataactataatgaaatatagactattgtgattcataaaagatacagaaagcgtgataggggagtcgaaaggatggtacatttcatctagatggggaagatcaaagaaggcttccaaggacttaatttagaattgaaaaatgtgggtaaattctgtaaattcaaaagtgggaaagaaggcattttacatgagggaacagcctgtactgaggcatcgagatgagagaattttaggttctccgtgggcaatggtggaaatgtatttgggaaaatagattgacagcagctctgaaatatcttaaaggccaaacagtatttctggtgttagtttgcaggagtaagctattaaagttggtttattattttttgagcggaaaagagctgtagtcacagatgcgttagaaaacaaaactcaaagaacgaaaagggaaaacaaaagaaggatccatagtaaagtgtaatattgattgtcgagatgaagcacctgaagtgagagtgaccagatgggaagctatggatatcatggcatcattcagtaattctcaatcctggttgcatgttggaattttctgtaaattaattacccagtcccatgcactgttttctgttttaattgatttagggtggggttcaggcacctgtagctttcattttttttttttttcttttaggactcccaggtgattctaatgtccagtttaggagtgaaccatggccattgtttttgggtacaaaaaagagggataagacatattagtgataaatcagtagaacttaataattggtattgtgggcaaaggagaaggcagaagaggaggctgaggctgttaggtggggtatatgggagagtgaatatgccaaaaacagaaatgaacactcagtaagaggagaaggactgggaaggcaaatgacatggtatgttttcaacacaacaattttgagatgctggaaggtaatctttcaagcagttagaaataataacctaacattgatagaaagtgcaagtgggagataatcttttcactaaattaaatcttttcttcctctcttcatttcttccttccctttcttcttctctctccttttctgttcctgtctgtcagtgtgcctatcagccctttgaaaaattagatattggtagtcatacagaggcatagatatctatctaccaaatgggaaatgctttaatactcattctaaaggaattgagagttgaggcctaaataaaattaatggtatagacatgcatagaaatatgtcattgaagtgtcttgaaatggaagagagttaatcagtgtcaagaactgtattgaggtatttgtctttttaaatcatgagcaaatggaatgtataagtaaaataataccaaagtagcctaccatgctaaacttggaatttgggtgatttgtttatgaattttctgacattgatttttgtctcttggtcagacatcgtaatctctgatttcaattggatcctgggatgatgttacactttaagagaacttttaaatacagcatattctgggtgaagtttctcacttagctagtgaaaaataattgctgtagtatggcacaaagtacgtgccaatcccttgagaagacaatcagtatacattttatagttacataaaagatatttcaaaatatttaataaattgcgatatattatctgtgcaatctttataattttctagcttgtaatttggcacagtgaaaatattagtgttacaagatctttggggtgttattttcctggccagaaacctctgtggccagtggcacctttatccaagttttgctcaggcccgttggtcttgttctgcccacctggcctggcaggctgcactcagctcacactaccggcctggatcccatgtcttcaagggagactgcgagtcaggcatggaatggcaaggggtgtgtgagtgaacgtggggtttggtcactgcacagtcagacatgttggccgctgccacggggtgggcggttccgggtgctagtatggctgccagttctccgtgaggcagcggttggaccaggagcaccacagcagcttccctggctggcactggtgaatgcagtggcacctggaaacttggaaacaacaggaaccactaggccccaaagagtgagtcacagccctggcttggggagctcccaggtctggggtcctcaaagggccacagcccttctctccttctcttcatctgcaacgtggtgagcaaggggcatgtttcagccctgtttgtgttacagctcttttagccttgccagttggctggtcctgagttcttgtcctgtgaccaggaagaatgaggtatgcagacaagtggaggatgagcaagacgaagaagagctttattgagcaataggaaagctcagaggagacccatagtgggcatcttctctccgtctcagggtgtcctgatgaatgttcagctcctgtcagagagggtagctcctctctgttaggcaggtcgtccggagtgttcacctcccagcagagagggtagctcctctctgttaagcaagtcctcagttctcatcagagagggtagctcctctctgcagctggtcatcccagcaggtgttcagctaacaacagagagagtcgtgcctttttgcagctggttgtcccatctgctttgctktggctgagcctggaacttttatgggcctcagaggggatgaagtgcatgccagctggtccatggacagccatgggcggtcccagaaaaggcaccaccagttcccactatggtctgtggggctgacagcccagcactcagacttcaggccctccctggcctgaaggtgggacctcaccggatccatccccttctgcccaggagcctgtctgcctcctgccaccaactgtggcacccaggctgctcacgccaaggggcatctgcaggccctgagttgccctcagctccccacttggcttcccytccaccctkgtcagtacctaaagtctgggggtgctgaggcagcaaggggctggtgtctcagtgctgccccaacatgtgcacactcagtcaggctgacagcacctaggctcggcctcaactctgctctgagatcagagctgcgagcagtggtggcaggagtggctgcagaggcagcagtggtggtggtgggtcccctattccccgcttcccctatgccctgcgtccctgaggcagcccatctgcagccagtgtgagggcagtggccgctccacatggcctgctgctgctgccatcatgaggggttcacaattagatcagaagttctctcactcataacctcagtgactcctccttactgtcttttcatatattttccttccttcctttctttcttcctgccttccttccttccttccctccctcccttcctaatacctatattactaaaaagctttctataaatctataaaataggagtaatgataacatcttgcaagactctttgaaaacaccrtatataagatatattaaacatttagtctagtgcatggaactcaaggagcagttatttctttattccattctaaagtataatgcttcttaaatcaaattttaaaactaacaggtggttttgggagctgtatttaaaaagaaataccataaacaatttttttgaaagtctgtttgattttgaagatctatcctgaccacagatgtcaacaggtgaccctgttcaaatttcatgtgacagattcactgtccccacaggccctggttcatgtagaacctctgctatggaagctaccccaggtggtatctgtgccatgcttttgccctcctaagcaatgatacatcaactttgggacctccctccctttcgtcatgtgttggtatagttgtgctgttgacttgggcaggttgtctgtcactacccttgtcccagtgaaaatgaagctaattataacaaaaacctatcatccacacaaactctggatgccccatgtttgcgaaagtgtcaataggatgtgctgtggctggaagggaatgtaaagtcccatggtaactcattcccctcaaaccttcagaccaggctactacccttggaaccacccctcactcttctgctatgcactgcatttcccaccagaccccaaaggccctgttcctgagctctccttcagagctctcatcctgacgcttacagagaaagaaagatcagagatgacttcagctgatcttctcataaattctacaggcactttttaaggaggaagcagattgctaaagacaggggtacctgcatgttcccactgaacattctctccctgtctcatttaacagcaatattcaccttcccctttaaaaattttaagtacattgttatgacaaacagccctttaaaaacaaaactctgtatttaaggaaatgttaatcagttaaaagaaacaaagccaattcgttacatgctgttagttttgttccccatgccacatattttcttgatgtccacaagaaacagcttattaattagaattaaattagataaatggcaccctcattttgtctcttcacttttgtagcatgtgatcctttctatgaatctgttttaagtcagttggccaatcatatacctcaactctaagttatctacttaacctttaggaatttctcataaattgcattcatctgtggatgttactggtggacttcaatggctctccccgatttatgtctagcactacttagtatagtgtacgaaagggaggattttgtcctcagtacggcagtttgttaaggacagacaaaagcagtttgctggtcttggttggttctctcacctacatttaatagctataagtgcacattgagctcatcaccttgtcttcagagtgcctagcaacttgaaacatgatatggcatccaaatattagacccattaggttcaaagatactgtgcattggttagactttaagaaacaatctaacttcttaaaagcaaaaatcagtgcgcagtttgtggcttctcttgagctgtgtagcaaataataatctactaaattccaggagctatggcctgtgttgtgaatgcatcctgagaatgtacagtctttgaaaatggcaagcgagcctggcagacacattctagaatatcggccatgtctctgttgtgacgcatatgcatgcgtagcttctctactttccatttagaaaatagactttctgggttgaccagtaatttgacctgtgcagtacctggcattagtttaataaaagatcatactcctcacttgtcaaaaccaacttgagcacaaatgcattttgcaaagtacagcattggcagcttcaggtagatggcaatggtgattagctacagcagtaatggaaggatgcctctctaaataatggtgactggaaagttctaatgcctttctccccatctttataccttgatatttcttttttttgtacactaactataatactgatggttgtatctcatgggataaaaacggagattttcacgattcaaatcttagtctgtcctatgttgtgactttttagtagatacccttgttttatgctttacttgaattctcttccctttcttcccatcttcagagcatggcttaaatttggacaatatctatgacaaaataaggcagacgattcatcatgttccttttattaaactgagatatggagaagggaagtgggtgatgtgtgttgttatatccctctgagaataaagatttttacttgcctcaagcatttgttggggttattaagtttagtcttctctctacctcatatctttcctttggctggctgcctagcattgacagacaccatctgagagtttgaccagcaaaaatgattatatatgcaccacccatgcttagtgaaaggattttactatattatcttgagtcttactttgtatcataggatgatgacatatatcctttttgtagttcggatcttgtgggcgaatctagaaaaattgacattgggtcccataggaaagtcatgattttcttgtcagtgaggccgatgtctttcatatatatatatgtattttttttttttttttacagaatttctstgtaaaagcccctgaaattatttaactgtagtgtgatcaattttattttcttgttttcaaagaataaatttaagrgcccttttaggtttttttgttttttttttttttgtttttttgttttttaagaatatcacrtcaatacagtggtaggatttagaaaaatagttccaggtcctaaaatagattctaactggttattttaataagtttaccacagttcaataggttaatttcattccatgacttggtctccagaaataaaatcstacagtagcatccaatggtcatttctttttcttttctttaaattttttatttttgagatggagtttcactcttgtcacccaggttgtagtgcagtggcgtgatctcggctcactgcaacctctgcctcctgggtggcatatttttatacttgtcaatattacacaaaaacttctctgcgtgtcgtgatggctcacacttgtaattccagcactttgtaaggctgaggcgggaggatccttgagccctggagttcaagacatgctgaacaacatagggagaccccatgtctacaaataataaaaacattacccaggcatggtggtgtgtggttgtgctcccagccactctggatgctaaggtgggaggactgactgagcctgggaggttgaggctgcagttagctttgatcgtgccactgcactgaagcctgaatgacagaccaagaccctgtctcaaaaaacaaacaaaaaacttcaatgcctgaccagaaaataaagataaatgagacacatacctggaaaacatcgaaatggcactcatacctattctccaagtgtatgggaattttgtctctctgcactccatttagaaataagatttctatgtttaatttgacttgtcctcacccaccagttatttccagatgagctttctaatttaggtccttacatggcaacaggacagatgaagcacttacccaagcatccattgcctagttgcagattgtcagaattgccaactcttcttcattctttgggttaagaaatgcaacggtatcccttaaaaaatatccagatgcagggaaaagggtatcctacttctagttttctttaatttctaatatagtgcacactcattttatgcaacagcccttcaatgtattcacatgttcttgcaagaaatttcagaacagaacttaaatgggaagctgggctcttacaatgtattttccttcccggttgacagtttttaggctatggacaagaaaaggaaggtagctaaaaatgacagtattgtaccatttaatacagcaatctattttgtgtttctagggaaattccctagaaattttaattgcataattataatttttccattggttactgacaagcaagtagttattatcaatttgcattgtttgaaacagcagaaagataaatataaaaacttgtaatatatttttcatttgtttccagaaaagtgacatcaatgtacagtgttttgtaatcctctcactgttagtcaattttaaattattttgaggccgggcgtggtggctcacgcctgtaatcccagcactttgggaggccaaggcaggtggatcacgaggtgacgagatcgagaccattctggcccacatggtcaaactctgtctctactaaaaatacaaaaattagctgagcgtggtggtacgcacctgtagtcctagctatttgggaggctgaggcaggagaatcgcttgaacctgggtagtggaggttgcagtgagtcgagattgtgccactgcactccaccctggcgacagagtgagactccatctaaaataaataaataaataaaaataaataaaaaataaaattattttaagtacttcccacagctcctagtaatcatctagtctgtattgctacactgagatgctacaggttatgatctctagcagggttgttagaggctgttttgctttcttaatatttttgaacataagcaggcccgcagttccaggatcaccaacaagttgaatttgctgatgaggtggtaattcattctccaggaccagcattgcaaatatgcctcttctgaacttccctcctttggaaataatatataaagctaggaaaccttgaaactggaagcaatttctgcaaattaatttatttcatatgtcatagttttgcaatttttgtaaattaatgtatttcatatgtcataccaagaaatggtaaagttacatgattttttttcctccaagattatccatatatgtattggtggagcttagataggaatccggcttccttgactccaagaaaaccaaacagagtcagaacacaccatcaagttaatgggaacaccatgtgggaaacatgaaatcaatacagagaagatactggtgatgaaccaagaagaacaaactttgttatgacttttttcttttttataatccaaggattgttttcaaaatcaattttagctatggttatttaaaaccacttttcaatgacatgtaagtagaacacagtaggagagaagagaaaatctgtaacagggattagaaattaaaaaaaaaaaaaaaaaagaaggaacagcaaaatgttttggggctttaaaacattttcagccagaacataattgtaaaaactcaaggaagtgtaaaagatggaaagcagtcggagaaataattaaaatgcctcctcctgaacaccattattagtgttttatttactttgttcaatctttgtgtgtgtgtgcatttttcattatctgctatccccacatataactctgtagtatgcttttgtggcttattattgcatcataagcatttctcatgtggtatgatacagattttataacacttaactacttgtatgatgttccatcttcatgccatattttatttcactgtgacagaaatcccatactgtttaatgtttcaactacttatactcttttgccaaacaaatgatatgatgaatatctttgtgcataagtattcatttacattttatatcattcttgtatgatagctatctagatcttgaaatacaagatgaaaaataagtaagttttttaaagaaggaggaagaatgttaggaacatttaaaggagatggaggatgttgaacaagcttccaatgtctatcttgctagccttagtaatctttaagtctacatctttgtataaaaaatattctttgctttactatgactttggaggcttcttgactcatcttcttttatgcaaattgtggagctaagtttcaagtaagacagcttacaatatctgggttagagagtcactttaccattttcccctatttctatttcttgcgaaaccttctaattcagggcgatatttcttgtctctttaaaatttcctagcatttctcttaaatgtcactaattttaatagctcagcagtggcaatgctgctttctggcagtgtcctgatagtggcatcaaagcaagcgctaaaattttacccactttgattgatgagctcattttgttagaggacaaattggatttttttatatactggtaataaaaattaatgtgtgatgttgcttttcggatgttattggatctctaccttaatacagatttcagcaataaaagcactaatagataacttaaccagaaagttatgtccttcccctttaaactaccctcaaaagtaaaagatgcttttctaattttgtaatcccatagtgcattgtaaaaatgtatgtcttgatggcggtgtggttsaggatggtggggagagcagcggtagtaggataatagtctgtatttcagttttcaatttaactgtgatgtttattttttatttcagcacctccaaggtttacacgaacacccgttgatcagacaggggtctctggcggagttgcctctttcatctgccaagctacgggagacccaagacctaaaattgtctggaacaaaaaaggaaagaaagtcagcaatcagagatttgaggtattaggtccattgttctgtttctctgggggaagaatgtatctgctctgtctttggtttctacgttayttgcttgctttactctgataaaaggtgtcactgatatatggtattccttacattgcaagtgatggraaatgtaactctaaatggctttttaaaaaaggaaatttgggggttcaagggctgatttttgtttctacttgtgccagggctcaatagtattcctaggattagtctgtcagtttcatccccaggttgcaagatggagctctgcaacctcacaggaccacgtctgtaggatgtatgaaagcttgtctcttccagaagcctctcatcccattggctcctattacgttacttgtgcatccctgagacaatttgtgtggataggtggacagtgtagcctacttaatttaagccaatcagaatctacctctgttctgggaatgaggacagtcccatccaattgcatggcttagaatgaaagagcagaattttcccaaaggaaatttaaatcctcgttatcaagaagaatgggaatggatgctaagcagcaaatgaagtggtccactgcccctcgcacctgtgttttacaagtagtgtgaactagaatgagaaatttgttccagtgttttaaagtactattctgaaagaaacacatgcaaacaggttgatattgcagagaaacctatcgaagaagttggttttctttattcaggagagctcagtgcagcgaagatggtgaaacataaatcaaagattctttttttgagtgtttgtgagaaggctgatggtttagaaatttgctcattctggaggagaaatataggcaataagatatatagaaagctacacagattatgggcacacaatagcatgcccatartttaagacatgagaaggayagctttaattttaggggctaccaatacccccaaactgcctgaaattgtgaaactcacctcccttttacctgagtttctaatctccttcatgacctaatttacagtttggcagattaaaggcaatttctagttaaaagaaatatagcaactacaaattcagaacaattttattttacttattttcataggaactcacagggtgatcaggggttcaaatgtatagagaacctaattaattacaatggtgaaattagaaatttgccattggaaattgggttgtagtttacaagtgagaagtttaaaattatgtctgaaaatcaaatacttgattattattgaaatataatttatttaaatacaaaaatatctttaatatttggaaaatgtttcctgtgtcatgtagaaaatgatgtatgtatgcatctttgctgcacattaaaaaaatttaaatgaagttaattttttgtcaaagagaagtttgacatcacgctttctaatgacaatggctcctgacaaaatcatgtaacaaaagtgaaattatactactaaatatttcacagcatgatctctgctcaatgcctaattccccatgagagtcatataaacacctttggggtaaatgaattatttttacccaaagcagcttcatcaaactgtatcaagtccttggttgaaaatctttactatatttaacactaatatatatataatatatatttaatatatattattaaatatatattattaaacaatatatatggtattactagtctgtatggtccctgagagcagtacatgttgactgtttttgctccctcttctatccccagtgctaagtatggtgtctggtccatggcaggcatgaaatcaatactggatattttcaaactggaaattacatcactggcgtgtaatgtgtggtatattgtatgttgtaagaggatagatctaaatctaggaaatagttcacaaatgtaaacatacaatgacatttattaataaattagtcaacatttaaattgggtttatagttgctttaaccttttcctacctaaatcataaaatgatcataaataacttttttaaaattatggaatgcttaacaaagcttccaatatgaaactatgaaacttttctttcctaagatgcatagtagatttattttaaagtgtatgctttatagagttgaaaataaactgtagtgcattgagaaatgggccattttgaatatttttgtgaattttgaacaaaaatggaatgcacaaagattgaagtggacatattttgaaaatatgaatgtccttcctctctgtgttaatatacacatgcacacacaaaatctggaattaagcaccccataaatatatatatgaggcaatctcaatttattcataatttaggcacatgggaatattcacagtgaaatacaagagaaaaaaggcacaacttctcagtgaacagctgaaggaatgcagcatagttacagaaaagacagaggactccataatattgtatacatatttgttaatatcatcatcttttttttttttaagtggtacttgaattagctaacaagtacccaggattatcagtgtcactaaactgtttccaagaagagttcctaatgatggtgaattcaggcttagtgtttaggacattaattttctgcctggtgaagcaagcctccattttacagcaagaatgctctaaaaatgcagaaaatgctaagctagaacaaatactggaatgatttatggcaaaattaatgcacaccatcaggcttttgggttgtgaaagctgtctcgttggctgcctaagtactagatttatgcaatttcttttcgtggtttgcctatctatactgttcaggatgagacagtttaaactagcagagctatctgtggtggcatgcattaattcttcaccttacagtcccattattgaatgaatccacattcgtatatgtgctgtgagagaaagaataatttaagaagtttatccattatagctgcaagcctcttgcaaaattaatagagtcaaattgccctagatgaacatactgaaatattttaatgaataaaccctggtagtttttagtagggactagaaatctccatgttttgcatatgtagttgcatatctttctccttgttcagtagaagattcactaaattagaccaaatattttttcaccactatatcaaaattcagtttcagaatgatgcctagtttattatgagcctaatggcggatccaccactgtattgagagctttagctgagaggtagacaattgtaacaacacctgtgacagctattgtttcctctaataggtaatagagtttgacgatgggtctggatcagttctcagaatacaacccttacggactccgagggatgaggccatttatgaatgtgtggcctcaaataatgtgggagaaataagtgtatccaccagactcacagttttgcggggtaagtgctcaagtgaaggttgtcgtttgtgtcattgttacaattctgtatctcttttgtagcatcattgaaaagactagcattgtgatggtgcttaaatgggaaactcagttaaatgtttgtaagacttgaactttaattagacagtggataccttctctagttttgggtctttacagaactagagttcagggggaatatcagaggtaaaaaagctgaraaaagcattgacttcaaatgccagataccattttgatttttggcagagcatctagaaaggaaacaggatatggtactcttttatatgttggcattactcgtgcatggatttttcatactgtattcagcagctacgttttttacaactaccacagctgacattgatatttgcagaattaaagaaagaaccttagcctaaagatgaactttccttaagcaattggtcagaaccaagtataagaaatgcacctgtcttatgtgaaaaaaaatacattttttatttgtctgttatctttcttaaaccaatatgtattgatctaaataactgggctgacaaatccctttctttgtctccaacaatgttgcttacacaatttgacaaaggcacagggtgagttgccagatctccagtacagtgtgttcagtttgtagacttcctttacaatgagagtgctggagaataaagctatgatgaagactgtgttgtatgtctctaattcaggcttctgtatagagatacgaacattccyaattaggcacctcacagttgacatttccagattaactattctgtgcctttatctctttctctccctcacacaactcatttgttttgttttgttgtattttcctctgttccaaaatttaggagaatagactttcctaacatgaaagaaattggaaaggaaacaatcagaatcatagaggaacttatgtagattaagtacatttctctactatttcattttttttacccccatggagggatggttttactttatatcttttataaaataaaaaagtttgatttgataaacatcttggtttctttcaaggaggtaagccctattgatattgtcaagaacttatttatttggaggccagcagtaattagtaatgtaggtcaaatttacctggtggttttgaaactaaacacacacacacacagacacacacacacacacacacacacacaaagaagcaattcaagaggctgagaaaatgagattatttacatatatatccttaattacgtttgaaatagtataaacaccttattaagttgcagggaaagtattgacaattggatgtatatcttttaaatgcatgtaacagatgctgctttaaaacagacaagtgagatttgagctacatttctggctgttatgacaagctaggttggtgcaggaagttccccattccctgaccaacacatagaaatgttgacaaagtatctgaaaataaaattaaaagcataattaggcttacaaacaagaaattgaaatttccagttgctaaaaacaagggagggatttcctagagaaaagacaattgtaataacccaagataataacaaaatggaccttatgctttagtgctggagttttaacactccagcaagatacatacgtatataaaataagttgagagtaacagagactagatcagctttctgcatacaagtgagatttccagcactattcctactgtgcaatactcaggaccaaatagtttaacataaaagctggtcagaaacagtgagtcccatagagtgtgcaacagacacccataatagcactcaccccacagagacattccgataatccagatacacaaccctagagaaggttgttcatacccagatgggctaatgaacaccagttctaaagcaatcaagtcagctaccaccagcaagcgacagtaagcccaaccatcaagggtggaaatcatagtctctgatccacaggtaactgaactgtatgaatgggtttcaaaatatatttaaaatatttgaaaagggaaaggaaggaatggtctaataggcaagaataagacattagggaaaaaaaagaataggagttagaaattagattttagaactggcaggaatcttagagactatgtttatatgtgctgtaatatgcactatggaaagtatacatatttctgaatatacatacatagttcacttcagcttgtctgaaaattgtcatttttcaggtgttcatatttgaagccaaatctggctcatttgttcatctgctttaaaaattttaatctccatttatttacctagtttagaatcagtgccatcatatagaaggtatattaaaaaggtacaataaaataaaacttatcagaaacgtttttgagttttctcactttccaaatcccttgaactccttaaaaggaattaatggcagtcatgtgcttgacttatctttatgcatccaatgaagacattaacaaaaaattggagcaaaatatcactttacttagaaatttacatggattaatgttttcctgtctctcagttggctggagtttcatcatctcctctgcttttatacagctagtccccatataaaacaaatgcatcaaaaatgtttaatatggtctcaactttctatgtgaacatctgtcatatgtaagtatacttgtatgaaaatttatgatttgagtagttaaccctttccatttttttaaagactatgttgagcagttttagaactttcatgagaaaaattcaaaagtattttagatgacagaaaggtagtctaaacataatcttaaaatagaatacttttatatatccttttaggataaaataaatatggatggaaattatttttgtttcctggagtcactgtttgcttaaaacttctaaatattgttatttctattaatagtagtgtttaataatattccagtgtaaactgacattcatagactttgaacatcatgaatagctaaataaatgagtgtgaagaggtttataccacagttgaggagattttaggttcactttctcttgcaaatcatgttggcggacactcaggcactctgttctgcagtagatggagaccattttacacttttcgtccagtggcctcattagattcccatttcgtccacgtggatcatttactttctccctgctttactgacaaatgccaaaaatgtgccagctctcatgatgggctttatctaagtgaactggatgaagatcattsatttatctcacacaagctactagagaaactaattaattggagattcaaatatctgacctgtatggttaatgaagaagacattgaaataatactctgaccacccatgtgcctcgaagggagcatttcaggaacaagtttcccttcgtagcttgtttcaaattacscttactctcaaaaactgtgtttcaataaggagggataaccacaagctcaggctgaatgtgccccgaaataagatatttgggcaattaactataccatagagtgtggttcacgaaagaagtaggagaggggggaggtgaatgtagggcttatgtcttccaagtcattttaattttttagttgtcttggctatggaaacacaagaaaatactgactccctaatgatacaacactttaggaggctgagtatatctgttttacttgtgttttcccatcctaagcagaactttaagtgaaggccttaggatgtactgaggctactaaggactgtgccttaactaattgtggaatgctactaaggacagtgaattaactatcaggctttcagtgaagagcaagcataggaccagagagagtgttgtaagaacagggattgtcatctaaatggaattggttctgtctgtttcgttagtttgctggtcacaatttcttcctgactaaagatatcagcaggaaaccatgtaatacaaatttatgcagtgataactgaggatgaaaatattctctctgatagatgttatcaatcactaggcagggaaaatgagatatcaccatccatagacttttctttctagtaagagtccaagggtacttgcttcttttgggcaagaggaaagacatcaataattattcttacttacataacctcccttctctaagacaaagttctggaaccatttaatcaactttgaatctaagcatcttactaaatgtcatcatgtttcttgaacttagaattttttttaggggagtaatcagaaaatacattattttgctcttatctcaaacagcatgtaatgggtcatttaaaaaatcttagtagattatttttagactgggctgttctcaaatagcactgccccaaaccaccaccaccactagcacaacagaacagggtatgatatacaacactgctgctcttatctatttatagggaactggctttgttcatagaacatatctacagtacaattattgtctaaacatgctagtttaccagatatgaggcattttagttacctagtttagcaaatatatttcatcaagtgatacttatgtgtacctactcttacatataaatatattatttgtgaatgatcaccattaggacaaaagataatacgtgaagtacccaagtctaggtcttgggaaattgaattccagctttagctctgtcacaaaataactggmwtcttaagcaaatacgttaacttccctgttctgttctgtttcttttttttttttttggcctgatatgcattgggaaggccttggattagcgatgaaatcactcagatcacccctctccagctttccgtgattcattgacatgcctatttyagcaagtcagttcttgcaagatggaaaaaatttgctccctgaaggtgactgttactgagatagtaaaacacacagtgagcagttggatgagacagagaaggcactgcaatgggaaatagaaatgtttgcataatatgtctgtttcaaaaaatgtaagccattatggcagttgttaggaaaaaaaacatacaacttttacaatctttcagggagaaggcagtcaactatctctgccattgtgcagtaccctgtgatcagaattagcatgttgattacagtctcattttattaatgcctctttttgaagatgaacacagttgtccccgctgtgaaaatggtactttgccgtttatgttataaagtggtctcggctggagatccaggctaggaacattaaagaacaaagcacagctgcttgactgtcacacaaaaggatttttatgaaagactgaaacaaaaggaagggtggccaacacagaacaaacgtgctgacaattatggtactgactgaagattacttgaaaaggcttataaaatagttgagtacttggaatacattgataccaacacgataaagctttcgtgtgtacctcatttccatgctgggaaaaggtggtagtgggcagagccactttaagtgaacagacgctcctgactttcgttggtgtaatctttagaatttaaaaacagtgattctttgggtatcagtggtcacaaagacagaagcccatgtggatagtctatgagagaccctagtaaggggagacattaaaactgaaaatctgggggagaaagtgtacctgtgaggagacgctattcattttccttctgatctatcttttgaggactgttatgttggtgatgcatgctccttccttggaactattacttgttttgccacactgagatcatgtctaaaaagggctcagaaaaaatgagcacacttgtaaatcattgcattgaagtgagaacaattttcttcttttgacttcatattaaaatattatttttaataattttgaaatgaacatcaactcatgcgagtgtttactgctgcttaacttgttaaccgaaccatagaaatgttgagctagaagggaatttggtgtttacctagcctcactacttatttttgatgtaaggagccaaggtccagagagtttgacatgatttgttcttggtcgtacagctaagattttcatcgggtttggccaagtctgaagtgatccctgctgcagtacgtgtgacagtgagtttcagcccttcagatttttactttatatacaagatattgtcctggaagaacaatgttcttccagctgacatgtcgacagatgagcatgatgggaaataaaaagtgctcaagtgccatgggtgcaaaatgtgtaaaatgctacatggatgatacactgtgagagtgaggagactgctgggttggggcatgaagaatatttaggagtctgtgagacagagctaacttgagagaggagtagaaactagaagcttcttgagcaaagtggcttagggaggaaatcactgagtattgatggtaggtgtgtgcagtgtattagggttctctggagaaagagaaccccaacagaatatatacatatataggaagagccttattttaacaaattagctgacattattaatgaggccaagaagtttcaagatctgccaaagttggcagctggaggcccaggagagttgatgtgcagttctagtccacaggctggcaagctgaagacctaggaagagctgatgtttcagattgggtccaaaggcatgaaaaagctgatgtcccagtttgaaggtaggaggagttcttccttccttaggtgaggctcagctttattgttctctttagtgttttacctgattggataagggttgcccacattagggagggcaatctgctttgcttggtgactaaattaaatgttaatcgcatccaaaaacaccctgacagtaatgctcaagataacatttgaccaaatatttgagcaccccagatatttcgcctaatcaagtgacacgtacaattaaccattacaggtgggtataaacaatggtaggtcagaattgagcagaagtaaaatagtagtagtaaaagaaaatgaggttgggacgtgactcattggctaaggagataaacctaataagtgagaaaaggtgtgattaagttaacctaggccatctttatgtgagctgaaaattacaaaggagtttactaaaatacttcacttaaagtaatctatcaaacagtcattcatacataattgaggtttatatttaaaactaggtagttggttggctttcattgataaaatttgagcagtttttaaaaattcagtatcctggttttccaaattagttttattttaagctactaattaagatgtagttttaaaagttgtacatgcataatttattggtatttagggcacagatatgccaaatgcctcatctagggtttaattatcaaagccctaattacgtatctccttagaagagcaagtaacttattatatcttattaaaaaaacaatgacttgtgaattaatgccacattaaacacaactatgatgacacacatcccatattcttaatatgttttgttaaagatagcaagattttttttttttttttaactactgggcaatcggggaatagtcatatcatttcaagactctcttatctgtcatcttccaaaatgagctgtgttttaatttatatctaaaaactttccatgcctttcttttttgtttcttaraactttacctttgattattaaactttatccatgcattacataaatgttattttcaccctttaacacagtagattttttyttaattgatagatttttggtcataagtgtagcactattgagatttttctcacatgtctgatgatgtctgtattcaggttgaaaatttgatcatagtttgtattttcccagaagagatcctatatttcttggagcataaataccaaaagagctattaaaaaaatgaagctataaatcataagtgagaccagaaaatcaatattaacagtttttagatattttctacctttctaagtatcggcatacatagttctttctgtttgtttatgtatttgtttaattacgtgggtaactgcagatctgtcatttactggtcaactagaaaattaagtatagtagaaaagtatgtgctcataaaaacgtgatggcttttaataaagctagttattaactatcaatatttatacaaaaacttgagaaggtatatttgcatatatgtatgttttgtacatgtagtatatatatatatagtgtgtttgtatatgacctgtttaatttgcttcatagcactttttactatgtgaaattatactctttatgtcttgagacttttatcctgtatacctcttcctttgtgtataagctccattacagttttctatggcctagaaatgttcctggcatttattgggcacccaagagatatttgtggcatgaacaggtacatatgtagagggatctatagatatggttatgtagatacaatgcattaagagaccatttgggtaagaatgagtcttactttacatataatgaacaaaatagtcattatttcagtggcctctgcaagatgaagagcgtgattgagagtcaagaagtcgaggcaaagggaaagagaactacaaagacagagtgaaacagagggaatgaagagagatgctctttctagctacataagcatgaatttgtatcaaccttccagtgcttcctaactgtataggtttagacacattactcaagtctgaatgttaaattcctatctgtagggttgggggtgatcctggctatcttttagggctgttttgggggaagttaatgacatattaaatcatctggcagagtaactaacaataaagttgccaaagaatgttaatttccttccttctccctttattatccctttgaagctgagctagctggtttggctctcccatcactactgaatccccagcatctagaatagtgctaggcacatagtaattcagtaagtgttatatgtatacgtggctatggtgaagggaagggagggtgaagaactctgaaaaataagtttttgtgtcttctcaaatagtccttaatccaaaggactgaaaaacagcttttcacaaggaaataggatgatacaacaatctgaaaacatacagtattaccaagttattttgaaagactgaaaatcatttattggtgctatgctagtacacaatcccaagaattttagttcctttttttccccctgttacatttgtgcttattgttacgttaacacacatttccatattcttcagaatgcttatacattaggtaggtccaggtagtcaattgcttcaactgcctaactcaaactagagtcacactgtcgtactagaatattatttctgttctatgacatctaggtcacagactagataaaaatctataactgttttatgatttctgtgaaaatgtaacattagatatattttagaagaagcagaagaatttcaaatatccttgaaactttgaaagagataataggaaacattttcttgctttttcgtttattcgtttgttttgtttttttgattatttctgttaccaaccttggtgtaggaagtgatagaaggtgtagttatgggtgtaggttcagcaaacagacagacccgagttcaaatcctaacttcactatttgttttgcggcaaatgtgcacatttcctaacctctctaagcttcagcatctgtctatcaagtcgagataagaagacctattgagtaaacttaagaggatgattacaggagataatccatgtaaagctgttagcaaagttctaggcactcaggaaatgtgagttgttgttgtgattatcattatcatcactagtattactatgatcagtaggattattattaagagttaatttcaaattatttgattaaagggaactgccccatttgtgaagcagaactttttggcacaggcagaattatcttgctaaggctgggaatacacaaattttttaatccttaagtcaagctaccttgtccactaaataatcatgtggtccagatgccaccatttggctgttgtaggatccacaaaatatttgaaatttgaacatcattctgtcataagtgataggggagtatacttaagagaaaattagatgaaattttccttttatcctaaaaaacagagttagttgcatgcttagactagaagttccataagggcatggctttgttttgctctagactgtacacatggcagtaagcacagtgcctgacattttccataaacatttgtgttttttgtttttttagagacagggtaccactttgtcatccaggctggaatgcagtggtgagatcatagctcactgtaacctgtcactcctatgttcaagggatcttcccacctgagtccctgagttgctgggactatagtatgagtcatcttgcccagctaatttttttttttgtattttgtaaattttctttagaaaataggtcttgctatattgcccaggctggtcttgaactcttggcttaagcgatcctcccacctcgttttcccaaagtcatgggattacaggcataagycgctgctaccagccaaaatttcttgatggaatgaatgaatgacaagttttaggaaaaagtttctaaatattattttcttgcagactgctggatttaaggtttatttttaaaaattagaaatgtcaggagatgttgcttccacatctcggataggcatacaatatatgagaagcaatttgtattaattcatgaatttattcatttgataatctagctctctctagtccaggaagtgtgctaagtgttgggaataaaaagatggaaagaaactacccccacttgccttcaaggaagctacaatctctgatgggaagccataaatttggttaaaatgacaaggcagttatacatatatactgtggttggagataataaagtctatttttagaagaaaagtgctctcacagtaattcagcttacaccttttcaagctagtacttgccgtaagaactaatgtctccttgaatattccatcaatatgacagtaaggtttgttgaaatgtaagatgtgtttgacacatgaagcctcagctgacagaagaattaagctcacctttttgtcctgatgagtaaaaatgttctgagagaaaaattgtatttcatttgtaggaagatttgggatatactttggttcggttttgagaaaatatggtgcaataaaaaaacttaagtaattaccttcagagtaatatacccatttgtttctctcccaactaatagtaagaggagttttttattgctgcacttatcattttttatgattcttttttgctctaggtggagatgacagagcatacctaaatacaaaatgattttaaagtgtactggtaaaatgtcttaaaacatcttctccctcagaggacttcattaagcaaaattgatttttgtaataaaatatttatttattagaagatggtagtttaggcattttaacccttgaggaaaggccattagcatatactgtactccaaaacaggaacactgttatataagttactttttaaggcttgaacaacttggattagagccctgtatcctaaagagccttttatttacactcaaatttttatgcatgtcattataacttatgatgatagatctgaatttccaggtattgccaagcttgttataaactgacatcaagtgctacagctgacttactatgggtcccattaatcttagttgcaaagatgcgttaataaagttaacactcactggctcaatagcaaatggaattccctcatctcagcttacaaacagataaatcatcatctgggaggaagaattcactctgacttaaatgattattctcaaggatttgccataaacctagtacaaagaaccaaggaggacactaaatgctgcccagtaggactggggttttgcccagtacgactggggtttgagccaatcttttcttaattccctatcaacatttttaagatatgattgtgattatttaaaaacaaacaaattttttttwaaaattaaaattactttacmgcataatggtgaaatgctgatgtgatgtcttttacacaagcctggttaactatatgctaacagcattgattaagctcagggaccacgcttcctgtgtcctccagtgagatgaattcttgttcgaagacccccaccaaactcttgccatactcgggtgccagaaaatctctctcagaatggtggaggggaagtaattggtgtggagttgaagcagagacaggcttaccctgcagttgaggaatctttggaattagggccctcccttgtacgatgccttccaaagacccgggaagacttactagtatctccggttgattatatatttttctaaaatttgtaaaaataagatttttgcatttgttttcataaagtagtcctttaaagtttcgtaagctttagacttwataatatctaggtccgctgctgggatggggccaagggatctaagaactgcattgtactttacatatgattgaagaaaaattacttgtgtacatcagcacttgaatgtgagtctcacgtagaggggtgaatgtctttcctgaatcacaatcctccatggcttaatatagacttgaaaggactttgcccaatgtttataattctgtttctaaatttatggagaacatcttggtactatttttttcctttactgtttaacatacaatactacacaggcagtacacatccactgctctctcctgtaacaggatggttttgcacattacacaggattccctgccaccccctgccccccgccattaactggactgtacctggttaaaatttctccattctgaaaggtcaaggtttctatctcctctcattgcatttgaacagtaccaccaccaccatcactgatgcaaaataaccttttcatcaagacattagacactataaattcttaatttttatttttatgtaaactagctctaaagtctagtggcattatttactaaaattcaacaaatgaatttctgaactgattctccatgagcggcatgctgtcttgtttattaaaggagaagagacaggtagaaggcaggaatggtttaggcttcttctttaaagcgtttgtctgtaagataaatattagaagatcttcagatttcttttctcaatgagcaaaygatacagaacctctatttgcttgctcaggttttattggcaattagaaaagcaaagatcaaacaaaggaaaaaaatcctagagaattagtaattaccaagcrttcaatgcagttttggaatgtgtgaattttaatatataggtgttccatctgaggttctgatagattcttagccctaaaggagaggtctgctaagtgctttactgactactaaagggggtctgtgtgcagtgtctggagaggctacaagttcagagcagctgagattcagaggtggcttgaccaaacatgctggtaaatgtggtgattaccagattttctgactctaaagtttattctgtatttactacttcatatattgccctttaatgctatcttgcaaaggatacaatcgagtgtaatgtgacatagaaaartgtaagggttgattttttttgttttgggggtctctaggaaaaggatgaagatgtgtaaaagataccttaactccaccaagaggggctgctgagttggttgtgtaatggagatttatttagtcatcgtccttgagtttctgtgtaacctgggtagaaagagagctctgagaacacaaaaagatggggtggagtgggatgtaagagctgaatggttgtgaaaaataaaatgcattaaaaaggcattaaagaagacatagttatcactgaaaggytagttaagagggtacttctttttttaatgcatttggttgttatacctctttatatcttgtaaaatattatggtaattgaaataagccattcacagaaagacaaatgctatgggatctcactgatttgtggaatctaaaaaaattgatatcagtagtagagagtagaatgttggttaccagaggctgagcaggttgaggggtgggggttggggagatggtggtcaaaggatagaacatttcagttaggaggagtaagtttaagagaactgttgtagaacatggtgactatagttcataatgttttgtattcttgaaagatgctaagagaatgggtacaaagtattctcaaacacaaaagtggtaactatgtaagataatgcgtatgttactgagcaagatttaactrtttcacaatgtatacataatagttcaaaacatcattttgtatgtggtaaatacacttttatgtctcaattaaaaaataaatgtatggctgggtgcagtggctcaatcctgtaatcccagcattttgggaggctgaggttggcagatcacttgaggtcacgagtttgagactagcctgaccaacatggtgaaaccctgtttccggtaaaaaaaaaaaaaaaaaaaaaaaaacaaaaaaacacagacaaacacacacacacacacacacacacacacacaaaattagctgggtgtggtggcatgcacctgtagtctcaacccctcaggaggctgaggcaggaaaatcacttgaacccaggaggtggaagttacagtgagtcaagatcgcaccactgcattctagcctgggcaacagagcaatactctgtctaaaaacaagaataaataagtaaattaataaagatatttcttaaatgtttgaggcaaccacaggaagttaaaaggtgagggcaagtcatttcagatatgttggaactgagttgtcttggtgttttatgactccatggctttctctttgaaacctctggtagatggagattgtcaagataccataccattggtctgagaatctagcaagtaattagtcctctttcattaagaaaattattcacaggaatctttgatcaccattcatggctttatacacaatatgttttcatgaaaatgaacagtccagcatgagttttgtttgttctttttgaatattaccagttgatagacttgctgagctaattgaaaggtaccaagccctttacctatgtggtcttcatttaatatgtatcagattaagggacatggtaatctgttattcagaacccaaatatcttacaaatataggaaaatattcctttttctatggccccaaactcgtgcagcaaattttctttttgcgtctgtcttaaacagcagttggtggaagctttacaggtcttattgttgaggaagtgactttaaatttttattttaggcaaaagcatctgcaaattaagactgcggaaagcagcagtgagaagatcctcacagttctactcagttgggcaattcttcactactctgacaatttaattgggtgtaaaaagaaatggcaattaaaaatcaagagctttaagtgggacaacctaccagtttcaaagttagtgatttttttaaaaaatgagcaagactcaaagacggtacatctttagttctctagttagttgtttcctattgagtatgttctgtgctgaaattgccgtatcagatgtgcctttcaatggcaacttttacaagagtctaaagataaagagaagttgaattcacccttttatgtacatatataaatacacttatagaaatacttatttttaagaaagtttatctactcaagagtttcattttaaggatttttagactctttaaattcaagccttttggatttttaaaatcaagactgtaagacttaaaaacaaagtagttttgtttgttcttttaagtaggaatgaaatcagtattgcttatcccagtacttagacaagaggtgctacagagaagggactcaaatatgttgctgaaataatacatgtcagtaaattttaaaagttgggacatctaagtgacatatctgatgttgattgtagcctagtaatcaggaataggaataaattacttatgtacatcaggttttgcacatccacttgataagagttataagcatttctccaaaatgagacagcagttctctctcctgagaagtgcacaaatctcagctgcctctcagatcataatatgggtgcttcatcgaccaaccctcatcagagacactgagtagacatcttcattctcccagccttctttcccatctttcttctctctcttccttctttctgcaagtattttaggtaattgctgttattactcattgatttacttcacatcccttgacccatccaaggttcatgaactctcagtgtattttggtttatatcaaatgaaaatatatttttatctcttatagaagagccagattgggaaaaaaaggatttgtaaataagtattttggacaacagttatagaaagtagagtacggttgtactcacaggggtgttcgaataaatgccattttatacactgataatccccgattaaaccactaccaactgaacttctatatgaggaaatcagtgtgttctgtgccaactgaaggtctggatgagtttcagcttagcctctcatggagggcataatcacttcagcaggattaatagcatagttaaattattagtatttttagccagagtaaatcacatccaaaacatctaagaataaaactgtctagcccctctgtaataacatcggcagtctttatctctcacttgaaaggtagttttgtatgtgagatatgctctgaaagtagggtatctattgtagtagctttcaactttatgaataagattgcagatatgagagaaaaaccacaatctttttttgataagaaatagtgaatgtttctcacatttgtcatcattaaaaattctgttaaccacagaccacggtttattatctaatctatggttatcattctttattcagtctgcctagagtctgaagtaagggatccctgtgttcagttttgaaatacttctttcctttaacacatgggctttgaaattttatgaagacatggtagttatcaaacttgtaaagcaaggtgttaaatatttagtgcaaaatgaagttatgaagaccatgtactagatgaaattttaaaggagttttcctctagctcatctgccatgttacaacttgaaaagtctcctgacatctcgacattcccataagcttagtgtggacgcttttgtctttctgataagttcattggcccgttgcacttcaattgatttgtactgatggtccagtacctaaaaaagcctcatgtggttagaaagtcaggatatgaggtttggtggtagagtgaattatgtgtcaatagtagatcaacaattcacttgtatgactttaaaagtgattagctaactctcctttataaaatgtaaaaactttcattcataaatttctttttaaattttggggaaaatgtctgaataatagaaaaggaattgttttaaatggtactaaattatcaagattattttccccatgaagatgttgttcaagactgtggctgtagcacagactagctgacatatattgatatttcattgaagctgaaatatatattgatttcatgttgaaaatatatggacaaatctctttagaatgcaagaaagggacggaaattattacttcctgataaggacaaatttattattggggcatgcattttcctctcaaaatttttttttctttttaatgtcaaatcaatttttttcctaattttaagttagaatacagctattaaataaagacaggaaaagccactgagtgtatataggtgccatgctggattttatgtgtacgaaattcacttagaatggttttgttcttattagacatttttacccttgaggctagctagtcttttaagcaatgtgaactaatgcttctaaaaacatataattcaccttttaaaaaagaggagtgactttcctcaaaacaccatgaaaggccattgtccacacctaagaggacaaatgaaattaaaatagacctaatttagactgctctttcttcatgtttaaatagtggcgatagcttactttttctcaaagtaagcacacttgattttgcatgagtgcttggtgtacttactatgccctccttgaaaaatttgggccataaggtttaattgcatgctcatcaagcaaacagacttggaggtatattctctgagccgtgggctcccacagctcccattaacgctaatgggagttacacatgtgtattgaggagagaataatatagcctttgaagttggagttgctaattgagtgctttcttcagctgtgctcagcttcagtggctaagctgagttagagtggtctaaaatgtcattctggtaaagcccccagaacattatcaaagcaggttggcagtgaaagagayagctaaaaagaagtctttctcacccctcagatggagaaagaattagcaggccaaacaaaagaaggagcaaagaagtctcaagagtgggctctcctttctttaaaagtagcttgagctgatttagttcagaaagtgggaaaataggaagccctcttccttggtggagttacttgccatatgtagattactttttgtgaaatatgaggactagtcagggctaagtaattgtccaactctgtcgtagactttggctaacagatacttgttcctgaaagtgaccggatgtctgtcattttgtcttgtgtctcatgtcttttgtctcattttgtcattttgtctcatgtctaaaggtccaagatcccaatgtgccagatcccttatatgccctcttatttcttgcataaactcctttgtagtagttatctttgcaaagatatgagaagctgtaggattctacattgtagggctctacataaaaggaaaatgaaattgactcagtcctaaagagtacttaagtgattatcttctctatttcagtctaccctcatttatcctggccttccttacaacattcagcattaatctgtgtggcatcttatcaaactgaatacaggcagggaggtcttttactatgaataaacctatacctggtcatgggatgatcaaacctctgaactcattagtctcatttgccacaaatgcataaactggttgccttgtttgaccttagctgtgactgcatgtgttgggcaactcaaatattttgccactgtatgaaatggctgaaatcaccataagtattgacttggaggttacaaataaactttagcaaataggtgaattcacaaatatgaagaatgagggtcaaaaagctcagtgtaataccattgcttctcctggaagcatatcttaaatgacatttaccaataatgtattaatcatgtcatattcacatctgaatgacagtatattaaaaataacactatatcaaataacagaacaaaactagagaaactcatattctcactaatagcctcccagacttaccataatgtgaaggacacaactttactattttatagaaaaaaaaaaaactgcaagaatagcgatactcttctttgataagagctagttctaaaatgacagactatttattcatttaggaaagttcttgcagaaaagacagttgggctgagaatgtgaaaatgtaattctcctggtccctcagggtgtaagaaaaacaactaaaccagttatgaaactggtggttgcctctgtggactgtcatgtagaagagggattagactcattttgtgttcatgcagacagccaaatcaggctcagcgagtggcagatttttggattggtcccaggaagaactctggaatgatctcagcttcctgaaaattaccagggcaattttaggaggtagaggtgagtgatcattttctgggggtgctagagaggcaggagattcaaactttgggtaaaaaacacagcatgatgatgtcagagagtctgtgatgctatgatattttaatctgccctttattcccacttggatttatttttagttttaaaaaaaataagtcagtagcagaatagtctctcaagtatttctagatatggttgaagtgctctgtttcccagaaggaaggcaaagtaagatattataatgtttacacccttagcattaatgtcagggatagtacctttcccttccccttcctgctctctcttctagaaatggaagaggccactgagatgaaagaatgccatttctcttttaaaacatttgcagagtaactttgtcttaatctacatgtgcttttttatatttgttattcagtctattcaaaagtaacattctttgaatacctgttatgtgttggaagtaatggagagctaagacatcctaccctttgcccagcacgcacaccaaatataagtaaaatataagtctttttttactaatgaataaatgttagggttttgttattgacagaatgttgaatataaacacatgaaagtactaactactggtgttattaataatcctttcctttttgtaagttttaatacctaatcagtctgaaggcacggtagtagttcataacaatgccatacccaatcacagaacacatcatgatttaaactaatcgattataattttaaataatcactctagaggcaattgtttaaaacatgctaatagtcttgcataaaaaagaatgtgaaatgtcttcattgttctctactggagaaaagttgaggcaggtaccacttgtatgtgggtggtcccaccagcctcagggtcccccagaagttgtcatcctcttctcacctcagtgaacatccctccaaaacactgcattcttatttcagtcaatagtaccgccatccttctccctgtgtccaagttcgaagcatgtggattttcattaacttattcttctgtcttgcttcttctgaccaatgcattcccatgtaataactgacaagtgacccttgtgtttttccttaccttccgatttgcttctaacaccttaattgaacagcttcctttctccattgtacagcctctcaaatgatctatctacagtttcactcaaacacctccacttaattcaggtacagctgccagttgtatcctttgcctatagactcaaattcatacatttaatcttggcctttaaatgaaatgaacatttttcagtgcttttgaattgatatggccaaacatacaaaagcaaacaatggaatatgaaatataaatatacttactggatgaatcgtgtaaaggagatatgttttgtaggatatttaggtataaaaaggagtagttaacattgaaatatcatctttctggaagttataatgaatgctattcctgcttcctttccttttgttttgttttgttttgttttgttttcttttcttttcacaaggtcttgatatttaggtacaaaaaggagtagttaacattgaaacatcgtctttctggaagttataatgaatgctattcctgctctctttccctcccctcccaaaccctcccctcccctcccctcccctcttttgttttcttttgttttctcttttcttttcttttcttttcacaaggtcttgatatttaggtacaaaaaggagtagttaacattgaaacatcatctttctggaagtgataatgaatgctattcctgctctctttccttctcctcctctcttctcctctcctcttttttcttttctctcccctcccctcccctcccctcctttcttttcttttctcttttcttttcttttcttttttcttttgtcttttctttttttcttttgacagggtcttgccctgtcactcaggctggagtgcagtggctggatcacacacaggtcattgcagcccagaccttccaggctcaggtggtcctcccacctgacccctgccagtagctgggaatacaggtgcacaccaccatgccctgctaatttttgtattttttgtagagacagggttttgtcatgttgcccaggctggtctcgaactcctgggctcaagcaattcaccttcctcaggcttccaaagtgctgggattacaggtgtgagccactacgcctggccctgctctggtttttattcccctttctttccatcctttaccccatgttctggttggtcacttccattttcctcatcttttagtgacgtcatcataaggatagctttgcccaactggcaagtcctaccaatatttgtgatagttaaaaaaatatatatcctctgattagaacagagtcaggctcatttaactttgatattcttgtttaacaaatgaacaatcagctttttggttattttcttactttacaggggataccattaagaaaaacattctcagttgtgaaaagtaaggaattacatctattttagtgattataagaaatgtaatcttttggatatgttattttttcatcacgtgttttgagtatcctagtatttatgaaaagaataaaccataaatttagatggaggaccatataatatttcaacatgaaaatataaaaccataatggttgttgatgtggaaaatgttaatgtaattagctaggcttagaaaaacttactttcagcatgttagcagctggctagtaaagttatttttctggggcttgttgttgccctttcatctaaaccagatcacgtcctgttgtatggtttaatgaaatgattatatggaaaataaaaagtgccaggaaattaaagctcttctaaaaactaagtagaataacacagcagaactagactggatgaaataatgtccctgtaacttcaaacagtgaatgaaaccacagtggtgcaccaagactggcatttggctattgaactgaatatttatgagtaaatactttaaaggtcagtctgtggtgcttagcatgcccactccttgactttcgcagcttttttgctgttcaaatagaatggtttaagttttcatttgtctaacagagaggaaagaagcatcagcccttggtttttagtttggattcagstatctataggagaccatgtggtgtggctgggacactgggctgggcaccagaaaaactaggatcccatcccagaatcgacactaactagcaatgtaatgttgaacaaaaaccctaggctttccagtgcctcagattttttcctctgaatactgaaattgataatagccaccatttattgagtatttaatatgtgccraacagtatgctaagtgctttacaaaaaatatatatatgtgttttacttttcacagcaatcctgtgaagtattatctctttgaaatagatgggtgcactgcagttcagaaagagcagtgtttgcacaacaacaaataataatgatgatgataaagatcacttaacaaaaagtgtgctgctatgccaaaatacttaaaatgtgtgctactcttaaaccactttagtctacaggttagcccatttaatctcgatatcagtcctgagggataggtagaaaattagttctcccactttactaatagggagcctgagctacagtgagccttagtagctcagctcgtaatcagaacttaatatgaatctaatcttgtcttattcaacatttatgttggagtttttaatgtaggaaatatactgaattttttctcctttatattatttgtataaggaaaaaatacggttaaaaggaaggaaaaagtcaaatgattaagggaaaacctcaaaatactcaagtatcccttccatttttatgaattatgagcaaatcatttattgcagggtaatttagtacctataaccagctattagtaaaaataaacttgagttaaatagtgatgttcaaatgtggattttgtgttgatttataatttttatttaattttactctttaagtgccctgttttatgagtggtgctaaattgctcctgttctgtggtttttgtgtatggatgagcagagatcttcacatggtaacacaagcttccgtggaatgcacatccacctgattcaggcatccagttacatacttgtcacatattaatttagtttattttcatgatacttctatcataagggcaatgcttttcacaactcatcaatctaaaataaaggtaagaaaagatgacaaaaccacaaaacatgaaacagagcctgaccttgaagaaactgacttcacatcccatatccttcctatgctctgtgctgctgccctttatggagttacctcctaaacaccctgtccagtgctgccacgtgaacacactcaagtcctgggatgcagccaagcatatgtgaaatgataaagttaatatgtctcatcttcccggaatatcagcttttctcagagattgaaggaaaacaaggattatttaatattaaaattacattcattgaggagacaaacgtaaaattctcattcacttttaagatgagacaagatgtgagaattttgtttttgttgatggttgtgctgcactttgcccacagatgactctggtcctctgaattatagaggtgatatgtgggaaacactgagaagcctgtttttcacctggttgcttctttgcgaagtcctgtctgagtctcatcactctgcaaaatgcctcaaccacttgacttgtgctgattcactctctttgggccacttatcctttcccaattgtagagataaagtacatatggcccgattcatgaagatccctgaagagaaatttccataaacccctccagaattaagaaaattaaaggagtacttctattcttccttttttatttttttcggtgcattttcaaagttctgtttacatcatccatttgccgtcagtactctaatggcaactgctattcatgtactaaacgccgtgattttccagtattctggctgatttgatatatgtggacagttaattcagattcagattccctgctgccctggagcaggggatgggtcaagccataagaagatatgggagagacactgagagtctctgagtggttctaagtgactctcttggaatataccagttgctttagatttgagcgctctgctgggtgaacagggagcgctaaaatataccacagtgatgctttgctaagtggcattctagagtttggaaatacctctcgttcttcctatctwatctctttattaggaataccatatgctggcccttttgtagtataagcaaaatactttactaaaattttataatgtgccgtttttcatccctatttcatgacagctgaactggatcatccaagtcatgaaattttactttggaacttgaattagttcaactatttgtattatccgggttaatagggtaacagtaatatcttcaattcaatatgtaatgtatagatatatcctatacagaagtctagattaaaaaaaaaaaggtttagaaatactgtgtcctattctcagctatatgcggaattgaataatggaaaaacagtgtactgggttatcggattagaatgcagtgcgtcgtaaaagctgacatcctgtaatcacagatgtttgcagcccaagtgtggcaggcagcctccatgttaacttgaatagagttatatttgacatgtaaacatgtgacacaagaataatatttgtttcctataaagtccaccataatgtaaaaacatcccttaaacttattgctaggttgccttaaaattatatatcctagatttgcaataaactgtaataaaataaatatttgtgtttatttattaagtgactattctatgaatctccacgaggtttggcatggcagctctagtaggagatggtcattctccattgcaaatggcattataaccaggggccactcccattcgtttttaattaattaatttattttttaattttttttccgagacagaatctcgctcagtctcccaggctggagtgcagtggcgcagtcttggctcagtgcaacttctccctcccgggctcaagcaattctcctgcctcagcctcctgagcagctggtattacaggcgcgtgtcaccacgatcagctaatttttgtattttttgtagagacggggtttcaccatgttgaccagactgatctcaaactcctgaccttgtgatccacccacctcagcctcccaaagtgttgggattacaggcatgcggcaccgcacccggccctattcctacttattttatgaattttttaatttgctgtttatatgcttacagattttaatagacaaaattgtagatacttaccatgtacatgatgtttttaagtatatatacactgtggaatgactaaacctagctaatttacatatgcattaactcacctagttatattttttgtggtgagaattctttatatccgccctcttagcatttttcaagaatataatattaactatactcaccatgttctacaatagatctcttgaacttgtttctcctaaccaaaattttgtatcctttgtccaatgtcttcccaactattccaaaccctgcagccccaggtagtcagcattctaccattgatttatgtgtctgctccagcccccattgggcttctgttgaagttaagcattcaagtaaggttttctttacctaagactattgtcctgcttctacagagagagatgcccaaatttggtcamacaaaaaaaactgtgacagatcctggattcatttataatttaagcaatgtgctttgtgaacattttgaataaagtttctgtaacttaaaatgtggcaactaaggaggtgagagagattattgtatagatataaaaatgaccttcctctagcataaaatataaacaaaatatgaaaagactgtttagcattgttttcatgtgcagaaggggtggaggtgtttaggagaaagggagaaaggcagaatggatttcagaatatcaagcatcatgtagtgaagtaaagcttggtgccctaaatagcatctggggttggtttccctccttcaacagttacttatttactccctggaaataaattgaaaacttatttcatctcttttatacatcatatggtctggattcttgatgcttgcacataggaaacgtatgtctctgcatatgcttcatgtctcttcatttgttaggttgagaggcccctgtaagatgctattcacaggtaattgattttccttctcttggcttttcttccccacatgaaaggactagactgtgatcttcctcaaggcatactggcattacattagcattctctaattgtagaatcatgcctattggctactgtgagggkgtgtgtgtgtgtgtttgtgaatgcatgtaaagacagttatttggacacttttccctcctttcttttccttcccttggaacctccttcctcctttcctcatcactacattccacaaaggaattcctggagacatgccttcagagagattttgtccacaattgtatgtagatccattcattgttttgtgcttataaagcataaaatggaatgaaataaggatccttttagtttaggttctttaggatgatatagtatacgatgtacatccccacccctcgacacccccgctccccgaaaaataaaaacaaaaacaaaaaaacccaaaggactcatccatgctstggcacacctgtgcttctgatttacatgctacaaatcgtatcagagaggtggctgtaatagctggtaggatgatcaatccctagtaagtagagtatgcttatgttgccaacttccatagagatgagcagaaaggcctggaagtggtgtaagtctgttgaagcacaaggtaatggcatgagtgctgaagggaaccaacgtgcactgatgtcacatcatgtgcaaaagcattctgccaggtgatttaggtacattctcctttcatcctcacagtatcttgaaagttttatattatccctatttatgtagagatggaggcttccagaggcttagtaacttgcctaaagactcacagtaactagcccatctagagtaaacccatgtttgttttctgactgtaaccactgaggagtcttcactgaagctcttctcttttgtgaaatgaaagaatccgccttctttgacccaatggtttcaggtcatctcaaaaatggttttggtgaggtagaaaatggctctcagttttttttctctagttcggttgaatgagctcaaagagcaggcaaaactatgataatgaagttaaattcacaacccattaaacctaagccaatagttaagtccaattatgcttagcacttgcagcttacataaatattaaattgtcaggtttaatatacttcaaaatttgctcacccacatttttccaacttcattattttaaggtctgctgaggcatattatgttggcaaaatgctttcttgctgaagaggttgatagaagaagagtttatttgtggcagttgggttgggagcatgggcagttgcacagtttgataggccagaggttaccaagagtgattcaactaatagattaaaagatggcagtttatttttgttttgttacttaaataaatggaaaacccagaaatcaaattgctattgttcctaaataagttgcatggaaaataacttgcttactttcccatacctcctcactggatatttgcacctaaatgtattgcagtaatctcaggctatacatgttaagggatgaccttattttctctcccattttctatattttccatctcagttaatggcatcatcatacccgtttatgaaagcctgaaaactcacagacttacttgatttctcttttcctccttattccaccaaactcagtaggcaatagcttaggagataattgattacttcagaaatgcatcttaaatttgacctcctcttttcatgctatatttatctgatttagcttgagtcccccttattgctttggggatttttgcaagggttttggcatctgttccttgactgtccactttggtatcattccccagtggctataggagaaaaccctgaggcagtatggccagggtcccttgctggcctcatcttggacttacccttatctgatgtaatgtacttcatgctcttgtcaggctgaactttccactcaaaaaatatcatgctgtgcttgtatttctctgccttagtaagtcttcttcctttcccaccctatctgtgattcatccagttaatgtttactgggaaatctattcctctgaaaaagatctagctcatatattacttccctggctattttctgagatctaatggtcctctcttgtgtgccactgtggcactttgctctttcctcgactataccttaaagcattgtgttttacttcatgcatgggtctcccctcctctcctgggaggatcttgaggttagagactatgtcttgtttttgagttccttactttacaacaacagtactgggcacatagtagattgtcaatgaatgttaattcattgacagtatgatatgctggaagctgaagtgaagaattaaacactctcagcataattgtttaattttggatatatgtagttgtgagaatagctatattgtgtttccaggacaggtaggagaaactttgaggcatggttgataggaaacacattatagtgtctaatgctttttaatacaaagtacatgttttcattgtagcctttcttctaattagttgggcttttccattaagggatttcactataactaaattgtgaaatatttgcatgtggaagcaatgtataattgtttgtttcctccaaagtcctgaaaatatttctaattaatactttattattgatagattgattatatcaatggataggagagttaggacatgtacttttcatcaacttcccttataagtaacaactatagttggatttatattctaagttgattaatcgtctaactgcttgctgaattcgggtgacttctattgacagcatctgcttctcatataaaggaagtatttaacttaaaaaatggtgcttggggtgctaaggttcttctttttattcacgttataggaaaaaagttctcaaataagtgagaaagcaaaccgttaaggagatgtagctccagtgttacaaagtaaatacttttgaaaccactgactggagaaagctgtctatagggccaaagacccagcctttctactcacaccaagagtttaaactgttgtctaagtacaatataatatttaagaaaacttagatttttttcttttgcaattacaataaaagcaacctttaaatccagtttaatctaataattgccttgtagttccccagctgatgtctgtaaagagtaatgaatgattttacaaagactgaattaagcaacttataaatggtgaaacctctgaagtcaatgcaagtttattaaaatcattattagtttctggtaaggattatagtatacttccatgaatacaaatcatcttgcaggtaatagaatactacttatgattaagaacctctgtttgaaacctaaaaattgattaagacaggtttagttgctatatttttttgcagtgttgttggaatctcttcatcttccagtggcagcagtctaaggaagactaattcagtggtgggtttgactaaaggggattatatcgaatgagtttatgcagatgaatgaattagttgaatgagtatatgcaggtgcatagagatggagatggaattaaagctaggatacagatatagaaagatattcacattcattttgtgtatatacaaatgcatatatatgcacatgcatccatattcatttatttatgtaactgcatgtttctcttagtttgggcatggtgctgactctggaaaaatattgatgcaggttgagttcattcaagttgacagtcttttctattgacgattgtctgtagtgtctgarcacatgagactattacaaagagatgttgaaggccgttttggttttatgtcagataaaaacatgctgattcctgctgcagttttgaaaaacaattttaaaaattaaatatttgtttgtatattgtctttttacacgtttagggaattcatcatctcatgaaacaatggtctctggtattctcattcctgataaggctcatagtaagtttatatcatgtggcaagagtcacagttgctgttgtcatcctatttataagtggagagaagaagcaccaccaaaggcttatacagacaaggtagtgtgaagtctcagaagccctgggcaatgaggaaggtgtatgccagcaatatctaggggtctttacagatagatgtaattgtaaacaccttaattgtgaaaacatgttcacagttttctatttagaactattggctcaggtgaaagatagaatgctaaggtcgtttatagaaacacttttctttcaccagtttattggacattgtgcctgtaaatatatgcagagggagttcctgtcatgttccatttttccctccttttcatcttctgtttggtagcacattgctaagtgtaagtgactgagtgtagagatggagatctgatatcttctacccttttctgtccttgcagtgcactacattgggtcaccattgtcactacctataattattttcatctccatactggaggtccattccaggctggttgtgtaccttttgtacctagattccccaatctgscacaatgactaggtgcttgatacatatttcttaactgactaaattaataaatgtatggttttctaattttccttttccaaccctgataatatgtgcttttgatcatttgaattctatgctattcgtttaagaatttactctgtgacaacactgtcaatcagtaggaaaaacaatactgccatcagtagcatcccaaccccaatagcacagtggttcttggagacttgtagatgttttgccattttggtcttggataggctccagaaaagttctgtgcattaccaggcagaaactgttgttctcttgccttactttctcccaaacaaatggagtctgtctctgtgtgctgagctgcctggagccaagggtgaggtcatagaaaaaaccctgtggccatcaccactgggactatgctgtgtcatagctgaagcaagaatagcactgagtcttgcccaaggcctgctgtaaccattacctggctactatctatgtttgctcaaggccatagggctctacagtctgcaggtggcaaagccatccaggccttcttttaagggtggtgagttctgccaggcttgtggcagattcagagatgccatctgggagccagggactggagtcaaaaactttagaagtctacttggtgttctagtctgctgtggctgggctggcaataaagccatatgacatagtgcttctcactcttcggtcccctttccacagatagaggaacatcacaccatggccaccaccacgggcccatagggagtactgccaagctcctgccagtgttcacttaaggcctaaaagctcttcagtcagcttgtggctgccaggactgggactcacccttcaaggcgatcagctctttggcccagggcaggtctagaaatgccatccaggatgctggggacccggagagcctgcctggtgctttaccccactatggctgagstggtacctcaggtgcaagacaaagtttcttttttatttttccctctgcttttctcaagcagaagcagtttctccccatagccaccacagttggtaatatgatggttctcacctgaaaccagcatgtgtttgagacttacccaaggcctgtggtatattacctgggtattactgctggttctttagggactaagggctctttagtcagtagggtctggattctgcctggactgggtcctttgctacaaggcagcaggttcccttctggccaaagatgtgtctagaaatatcagggacctrgggcctataatggggacctcatgacctgaccagtgccccatcctactgtggctgtgtgggcatccaagatgcaagacagagtcctctttactctttcctcttctattctcaagcagaaggaaagggtgtcttttagagctgtgagctttgctgcctggtgttgatggaggggtgatccaagcactcccttaactacccaggctggagtgttagtaggttacatgcccctccagtccactggccgtgagcccagtgcagcactaggacttgcctaggaatttcagtatttgtggcctagactgcccctggagttcacatacggcctcagagtgcttcagcctgtgatggtgaggcttgtgggaactcaagctctgactgctgggatgggcaatcccctccgtctggctaggccagtccaaatgccccctccatgggcaggtgtcggctgaatacagcctggttctgctttccactgtgagagggcagcactgagttggatgaaagcctcccattcactgtgctccacccatcccaagcacatagattccttacactaccaggctgcagccaggggatgggggaggggcagcgtgggcaattcaccactgtcttttctaccttcttcagtgcctctttcaacaatatgaaatcaaaattaggcactgcgagtgctcacttgatttttggtttctaccaaaggggaggggccggccaggcgccgtggctcatgcctgtaaattccagcaatttggggggccgaggctggtggatcatctraggtagggaatttgagaccagcctgaccaacatggagaagccccgtctctactaaaagtacaaaattatccaggcgtggtggcgcacgcctgtaatcccagctactcaaggaggctgaagcaggagaatcgcttcaacccaggaggcggaggttgcagtgatcgcgccgttgcactccagcctgggcaacaagagtgaaactccgtttcaaaaaaaaaaaaaaaaaaaaaaaaaaagggtgggcgggtgggggaaagggccatcagtagagccctcatccatcttgcgttcccccttttgttttctgtgaattttgtgttttgtaactttctacttttgaattaagaaaaaaaagtatcaaaaaaattcattactccagagttattgtttgcatcagttttgcaaacacaagatgttccataggtaactgatgcttcaatgacktttgttttgtttttacttttcagaagagatggggtgcattcagggtgatatagacagatatggccatagacagtttttactttttgttttagtctgttcccacgctgctaataaagacatacctgagactgagtaatttataaaggaaagaggtttaactgactcacagttccacatggttgggtaggtctcacaatcatggtagaaggcaaatgagaagtaaagtcatgttttacatggtggaatgcaagagaatgtatgcaggagaactccccttcataaaaccatcacatctcatgagacgtattaagtctcatgagaacagcttgggaaagacctgcccacttgattcagttatctcccaccgggtccttcccaggacacgttataattatgggagctacaattcaaggtgagatttggatggggacacagacaaaccgtatcatttttcagttaaagttcaacctttgtctccttttccagcaaaggagcagaactctatacactctgtatcttttgctattttgcttctacgtcttgaaatgtctagacttgggattaatgattccaacttggctcatagattgataacccaagcattttaactcgttggaagacagcatttctctgagaaggtcagacagtggtttcctttacaaatggctyttccaatgaaagatcctctcccattcatgatgaaggatactttttagtgctatgaagtataagcagcattgtacatttgattggtttttggaaataattgcttgtgttaaaaggcatgatctgatagaaagaccattttcctagcctgttttctaagggtcaaaaataytatgctttcatattgactgattatatgtcctttattgtttcagtactttgatacttttcagatgctgggtttatttgtttatttatttatttatttattttatttttttgagacagtcttgttctgttgcctaggctggagtgcagtggcatgatctcggctcactgcagcctctgcctcctgggtttaagcaattctcctgcctcagcctcccgagtaactgggatacctgggaccaaaggagcatgccaccatactgggctaattttcatatttttaatagagacagggtttcaccatgttggccaggctggtctcaaactcctgacctcaggtgatctgccctcctcggcctcccagagtgcactggctatttttgaacaataatctcattgtagaaaatttggagaatgtatgaaagtctaatcatgatccagtgactcagataaatactgtaaacatgttggtagatgttctctcaggcttttctccatgcatatttatatgtttggctcttctctaactagtaagkggataaaaagacccctatcttctttagtaccaaaatgagagatgtttatagatggcataaaaagttattaatacatttgtaattttcttcaggatgatgagtcctttgtgtctttaaacaagttggtccaagaaaaatgagtacatttttcttttaaataataataaatatttgggatagtggattatacttgtcataggaggttaatgaagagtgaaaaaacaaatctgagtatttttaccaattcagacagattctgtatgaatgccaagccacataagtatttgagaatataagttacatctagggctcacagtgttcagggccatattgaataaagaaacacaactccttgggaacatcagtgagcatgaaattgatattgatttagagcccaacaaaaagtgttcagaaatctgaaatgtagttctaaatgtaaacttgaatgcattctgttttttatttgatctttccttcttccttttattttcactgttgtraaaatattttctccttttttttgttttattttgatatttttgcttttattgtttgtataaatgcaaagattggtaaattctttgtggaacaaggagggtgtattaacaggtatatgaataattttaaaaaaagccaaagtagcactgaatggaaatatagaactgaaacataattggtaaggggaggaaacttactttataaaaacagggataggcagaaatttatatatttcaatcttattcttgtcttgatattttgtctcatttctttccaatttttgaggctattaactagaatccctgtaagctatttaaagtactaactcaaagactgctcttccagggttaaatctaggaaaacagaaagattccccctttaacccttcactttgrgaataaatgaaaaggcagaattgataatgrcagtcatttgtaacgcatgattgtaattttaaaaatgcgctttttttctgttacaattgatttatttgagcaaatctaccatattttttagtgtaattaatagaagccataaatctctgcaagctgtttctgttaacagcayagtaatataggaacatgaggttttaggatgacatcctgttagatatttagctaaaaattgtatgcaccatttattaaatgtgtcaaatggagtccaaccatagcaccttaaaaaccaaagctatcacaagtttacttagtttcccaatascttatgtagcaaagctgtttatcaacaatattgttgctttgtgttgcctagcttagataaggattaaatattatagcattgtttaggactcttaacacagattttattaaatgtagtttatgtgtctaaatatattagtactattgtatatattgtaaatacttccttttaatcaattataatgtattgattaacctgcagttccttaagatggccaaatgataatattgaaaccartcttgtttttcaaaataactggacttttctttctcactttccgcattgtttctgctcctctgcaggcctcttgtcgtctgtttttttctttatgtgttaacgatgcttattctaagttcataaatagaaccatgaactcaatgtaatttacatttgtttaaataatgtagtatattaagcatcttttttatttttttcagatcttccccagagtgctttaaaagtaattattgtatttgtccacttgctaatttatttttgagactgtattataaatgcgtatatttatccatataatccatatatccatataatccatrtaatccataaaatccatatattttatgtgatggagtattattttcatattaagataattcatgatatgcaaaatactatattattttttcttgtattttataycttacaatgattggtgaacctcacattaccctgcattactatgaattctatagttttatcaaataggatatattacttttgtgaaaaagataaatatgtttagaatctctgatacctgtgcctttaagacatattgaagcttttaagaaaatccttgatcagcctgttatttccttccaggaacttaacctatgatttgtagcgatatacaatggcataggcacaacatagaattgcatctgttgtgggtaactaagataagtgtctagcctactgaagacatactaacttacacctttaaagagagacacatagagcaggaatttttaaaagtcaacacacatggattacgcatcattactttttcttattaattaggctataagctcagtgaaaacaagagcaccttctgattcattattatgacctccaatacagtaaacttagtaaataattctaaagaagagtgtttattgaattaaactaacttttcgatgcacttcatgaatagcattaagacaaaactaaactttctaagcacaaagagtttatcttgatgctcttaaactgttgccattaactttcccagacattggtttgttatattacatatatatgaaagattatgtgactatacatacatatataaagtctacatgtgtgtacattgtttttctccactcatggcttatatccagataaaagcagtactaatttttttccctctaagcactgaatgcccctgtatggcatttaaattctaaactgtctctctcaacataggtatatggttcaaataagctttgattggctatatggttttgtatgtcaacacctggctgatccttcttgttttttaaaaaactatttttcagagtaagcttatcatgtgatcaaactcttctgccatagtttggttgtctgcaatcttttcacacattttgacttaaagttttttatttaatttgccataaaaaaaaaaaaaaaacaggtttaggggctgggtgtggtggctcacacctgtaatcccagcactttgggaggccgaggcgggcagatcatgaggtcaggagatctagaccattttggctaacacggagaaaccacgtctctactaaaaatacaaaaaaattagctgggcatgatggtgggggcctgtagttccagctactcaggagtctgaggcaggagaatggagtgaacctgggaggcggagcttacagtgagccaagtttgcgccactgcactccagcctgggtgacagagtgagactctgtcccaaaaaaaaaaaaaaataagggggttaaacatatatgatttcattctcatactgctataaagaaatactcaagactgggtaatttataagaaaagaggcttaatcaactcacagttcttcatggctggggaggtcccaggaaacttagaatcatggcagaaagggaagcaggcacgttttacatggccgcaggcaagacagagcgagagcgtcggaaggagraacagtcaaacacatataaaaccatgatcttgtgaggactcactatcatgagaatagcatgggggaaactgcccccatgatccaatcacctcccaccaggtccctccctcgacatgtggggattacaattcaagatgagatttggatggggacacagccaaaccgtatcaaatgattaggtggatttttcaatatattgtggagttgtttgccaggatttatattatatatttgagttctgatgtttgtgccaaacattttaatattagagaatgattacagattcttaggagatctttgataaagtaaacttttccatttgtttgaaatttctttgtaagttttctattatagaaaagtgagataattaggatttatgtttatttggtttgatttttgtctttaaaaaacagcagactttggagtagaggataaaacatttaaagtaattgagtgtcatggagtggggattgtaaagtggagattggagattagatttattctgtgtgatttcacatgtcaaaccaatccagcaaaaaaagcaaacactagaattagtggaaattactgggcattatatattacatcaatgtagtgccttttctactattaggaagttaacttgggatctagagaagtccctatcactcatatcagtagtatatgcataactactatatgtgaatatatgagatatgcatatatatgtatcctactgggaaagacctcactaggttcccagggccagctctttgagaatcagtggtataatgaaatgctcagaaagaaaagatggaagttctctttaatcatgttgtatccatttcaccagctatgatggttctctggaggccatttgccaagggtgctatgatcatcatcaccatttgtgatacttgtttgctggttttagaagttgcattttccaaaatactaaacagctctttcattgaaaatctaccactcctcttaaggatatggcctcgaaaccttttatgatacagtgtttcacaccaataaagaatcaaattgtgagacatttctgctattaagatatcactgtctactccacattggtaagatgtttctccagctatactatgaggaagtaggagtttacaaaaagaagttaatgtcattttgagaagatctactagttatatctaccagttatatctccttatttgaggtctggaaacttgtttcttacttgaaattagaaatagcaacaacaaaggcaagcttacaataaacaagtgtgacctttcaccaggtctacgtaccttttgttccacactggttctgtaggcattaaaactgaatggtccagggagaccatagatatattatgaatttgtagtcaagcatcttctgtatcaggtgctgactttaccatcttaaccatccttagcaaaatttgacctcacaaagataaagataaacgccctcaagcaaggtcttttttcaatcaaatgctttcagttgaaaattttgtttcttttatgatttcctaacacttctgagaatatgactttccaaagaagtcctcatcagtgacagtaagtaagctcttcctagtttctcctcagccatcctttccagccttgtcttttgctgttccccyatttcttcctttcataccagccacataaaaacatcctgagcttcccaaatgtactgcccttatttatgtctgttggaaattgctttcatatttgtttatattgtccttcttgattctttctgtcaaacctctacctatccttcacgattcaacttaggtgctaccacctgtctttgacttcgttcagtaaagttagttatcttctcgttgagtctatattatgtaatagctgcattaacacgcagcatgttatattacaattatttgttatcttttaagcactaatttagtgaaaatcttcaagcacagcaacccttatgtgcttcgagacaccaattatctcaatatctgccactcagtaaccacgatattcaacctttgtcatgtgaataaagaaaagacatcaggaagcctgcttattattttggtgagacactttaaagaactgtagaatcaggacagtcagtatctcaagtgtgaatgcctttggtgtcgactgtaatcaaaatgaaagatgtagaatccttggaatttctactctgcaagtaaagagctgtgcacgttcccagagctattcaagtccttgtatgtcagtggcaagcagttactcacttaggagtcaactctaactccctataggccatatgcactattgttcattatcactgacacaccaggtgcttagattggttttaaagtttagtcagctaaagcggaaaggatattttacatgatcaagtcaggtttgtgtgagtgggttgaatttgggggtgtactttgagtctgagtagttgtttgaagagtgaaactttaagaagagctagaaggagggcattgagtttagctgaaagggtttagtatcaagacaaatctgtctgattaagtgtattgtcaatatgtcttatttttaatttttccacatagttcttttaaaatttaaatttccatgttaaagtcaccatattttgatactttttgaccccgtacattttatttcaaagttattttaataaatatatgcgattacaaggctggactggaattaattctgtaaaaccaacagctagctgccccaaatttattttttctctgtccagaaattcatgcagcttgagtcaaatctaaatttaaaggaagggaattaaacttatttatggccaactagctctttacactgaaggctattccgttagaaggtttacatagtgaatacagagttcacatttaaagcttgatttagtcttgtatcctatgcttaaactgaaattctgtgatatataagtgagattgctatttctagtttggtttgctctctaggctcatggaatggcaactctttcattactctcagacttggtaatttagccaactagacgtgtccttctgaatttgagcttcagaaattcttaagataatattcaattaaatcacttggaaaatgtccacctcctcctacattctttctcctcttgcttccatttttcataaattattctgtttgattttgattgcaatcaagcagtttatcttttgaaaattaaatccaacctgccaataaaaaaacaccttggatcagtgtatagaagtcagtgaagtcaaaatgaagttgaataaactctcccaacagaagagtgtcagatgtgtcttcctttgaagttttcaccattcacaggcaggagcaaaatatgattttcattattcttggttgtgggtagaccaaataatggccctgaccatcccactccaaatcacgactagttcctattctttggaaccttgtgatgactatgttaccctacaaggcaaagggaaattaaggttgcagatgcagttgatgttactattcatttgtccttaagtgagggagattattctgggttatccaggtgagcctaatgtaataataagggtctttaaattggaggcagaggagtcagtgtcagaattatgcaaaatgagaaagactcagctggcctttgctggctctgaagatgaaaaaggatcacaagccaaggaatgtgggcagcctctagaaactggaaaatgcaagaaggaagattctcccctatagcctccataaaggactgctaacatcagtcctgctgacacctcagtctaacccagtgaaactcatatgggacttctgacctccagaactgaaaaataataaatgtttttgttttaagccatcgagtttgtgacagctaattataacagcagtaggaaactaattacctaccttaattttagacagaactattctgtttggtttgtagctggttaaacttgcatgcaaatccctagtatttctatatttactatccatatgcctttgtgacccctgctcttcacaccaaagaaacattttaagaattcctttgagtcattcatttgtttgaaaacatccattctgttcatacctagtgccagttagtgaacacagtgtctttttggtttttgggttgcaagatgggaaagtagctacaggcttcaaatgtaaaaatataatctctaggaagagaaggacaggaaacttgataatcctatcacccataagtgaaagagactaaggcatgtaaaacttgattggttgcaactttctacccaccctctgataagtcttctgcacacttgaattttaggatatagcacacaaccatgcagcgttctccaaataaaataccttggaagacrtaattaacttagtycagaacaagtcattattattcttggatatccacacttatattacctccgcagagctcttatgtcatatttagaacttcattcattttttcttgagctattttcaaccctagcttaaggaagtctatatttgattcagatacttggaccatctggtttctattatcagctttaataaaatcaattccagctcatattatgactgtactatatctatacagattgtatagatataatatctatgtacccttaagtatggcctaggtcataatccttggaacctcgtgaacattgcaaaaaccracgttcataaccccagaaatctttgttaccgaggttcagtcattattagttgaccaagtgaacgcaagcaatttctgttatttccagcataattttcttccagaaaatttcctaatttacattttccaaatttgcaaatatacgtttgaaattgaacgtagccactgtgagacttcagcagtattcactgcaatctacaaaacattataacaggttgtgtaggcacagttcaggaatcagaggaatgtgtcaagtttctcattcaaacggaagcatgactttgttgatttctgaggtggcagacgtgccaacgcaaccaagtaccaggatactatccaagacaggtttctggagaggaacaacccctgctgggaactcactgtcatctacagaaattggattgtgttctgaactccatgttctagtttttaagtcacaaatagcttatggtgacagtgaattcctactccaagtagtatcttgttttcaacatggttaattcagataattagaattaggttggaaggttttcatattttttcttccatgttttcttattgtatttcttgagaatacatttataaagaatcaagcgacaagtcagaaagtcgctgtgattatgcttaattgtttatgatttagttccagaattccaggacttacgagaaccatatctagagtattttgctacattaaatgttattgtatgagatgtgacttttagtgtttatcggttaaaatttgtacttatctgagaagcagaagggtatatgttgagcttcctgaagatgcttgtttggttggtgggttgattgatttgatcagcacagcaactcttcatagtgtaaaggttagccagaataaattcctgtaagaatactttctttgcaacattttcctttgcgctagaaattctgaataatgttgatggtatatacttatatatcactcaaaattttctatagagctttcctatttatttttagtttataataacccagtaagaatctatagggatttcacattatttatattttagtttatagtgacccactaagaataacttttattaaatacaaattccttggctcttcggtggaaagcctgattcaggatgtctgaaatatggtccaagaatctctattttaacaattatccagattatccttttgaaacagggaagttgcctaaagatttctctgaagaagaatgagggttattcttatttctgctggttgatgaagaaattgaggcaaaatcaataacttcctaagattgcaggtcaagtagtgtctggttttctttgcattatctgatacatgtattatcttgtattatattatcttggtacgtgtatgcacaggtgtacacatgcctgtgagttctaggaagaaaatgaaaatatcttttctcctaaatgttttctgatacagttatcacattgctagtagttataaattgatttataagcacacttttaccaaaggattattctttctataataaagcaaagagctagatgcctacaaaaagaattgtggtttaaaaaaaacagttcattccctatccactgttgtgtcttttatatttcatagtgttggagacttgaacttccaaaacacattttggttattgcagttgtcataagcttaatatgactgtgacacaaagaaatgtcagctggtaagattttcttcaaaatataaagactacagctggcttcttatttttgtccattctaaagatactgtggctagcctaatttgtatgggcccactggatcatgcctaattaagttaatgaagctcttctgtaacaagaaccctccaaaggaaaataaaaacacagaatgaaatttcagaatgcagattagcctagctttgctggctttcgctctcatgggtagaagtcacagagtaaaacaaaatccttaaattaaaaccaattacaccatataggcaaagatcaggtttacctaaaattgtcacgggggagctgcatgtgttctgaggagaattgcccattggctggtagattgttgaaggctcttggcttcttagcctgagatgcacagagctattatttactccttaattctcgtgacttgattatttcaagtacttgttggcatctttgaggatttacgattttcatctggtcagtggaaacagacattcagaaaattatttgccacagtcgggatttatatttatggatctttaagttttgtcctttcctactaagtgttttcctctttcctttcttgtaacacatgtttcaaatttctttgttacttggctgtaaggaccatgtacagctttccaaggccgttgaggtcagatatttcatacctaagcatatctttattttccttttgggatataagagaacttttagtctgttgaacttaatttgatttttttccaaattcagctttccattttatgtgattaggaaactttaaggaatattatatagaaggttatattttactcattttactcaaaacattttgattaaatattttcgaattctacaagtttgtttaactacaacggtggcagaagccaatatgtatttattcttttcttttgaagtattaggaaaaggtcagtgaaattagaagaaaccttgcattactgtaaaagctgctgatttttgtactgttacagaggtgaacaaaattattaaaatataaaatctaaataaatccaaaatctaaataatgatcaaaccagttgtcataacatgtcactagtgcctctgcagatttttattatttgtaagtagttgaataaataaaaataaaaagtgtaaccctggtctcttaatatttctaggcttccgttctttttgtgttcgtttgtttgtttttttagatggagtctcgctctgtcgcccaggctggagtgcagtggtgtgatctcggctcactgcaagctctgcctcctggactcacaccattctcctgcctcagcctcccgagtagctgggactacaggcacccgccaccaccatgcccgcataattttttgtatttttagtagagactgggtttcaccgtgttagtcaggatggtctcaatcttccgacctcatggtccgcccacctcagtctcccaaagtgctgggattacaggcctgagccacggcgcccagccggcttcagtttctttattaagtgaggagttagagcaagataacctcgctgactttattatttaccactttatattttaaaatctagtattaatataaaatatttaagaacatacttggtctagcaatgccgttggcaaatgtgtgggtagcaatagaaaaccaaaggcatagacagtgactgggggtaggagggtaggcagcttgttgtagtgaggcagagctagaggtatggattctcatcttgatttacccatatgaaaagtcatactgtgttgtgggggcctcaacttttgaatatttaaaatggaatgatttaaccaagtcagcctgttaggttccctttttttgataattgcctttgatcccagcctagcagaagtggatgaaataaggacaacacaaagaacaatgaaagattccaatgtggaatgagtggtagaggctgacactgctatggtgaagaagggaagaaatatgagctggtgaagacttaatacagaagaatcaatgctggttatagagtctatttataatacacaagatattataaattattattattttttgagacagaatctagctctgtcaccaggctggagtgcattggtgcaatctcagctcaccgcaacttccacctcccgggttctagcaattctcctgcctcaacctccgaagtagctgggattacaggcacacgccgccacgcctagctaatttttgtatttttaatagagatggggtttcaccatgttggccaggctggtctctatctcctgaccttgttatctgcccacctcagttacccaaagtcctgggattacaggtgtgagccactgctcctggcctataaattattttttaaaagtaatgcctattgttaaatccacaaattgtttatgagtttaattggttataataaaattttaatctttgactgatggcacaatcatggcagagagaggacaagtggatttatgagatgactgactccataacaatgttttgatctctaacataagaacatagtctacctcatagagcttttaaaaggtgtaatgaaatagtacaggcagagaaatcagaagtgcctggcaaaatgcaagcattttttcaatgcaattgtaaatttcactcagaaaaataactttcacacatggcagacattcatatagttttaccagaatatataaataaatacatttcatctgagcaagtaaaggatactaagaaatctgacttacctacatatagagttaggactactttgcaatgtatggtggttggtatggtacagagttgtcatgttcatggccattaatgtgacccaaatgaaattaaatcccaccaattcttacacatttttatggtgtccagcctttcttcatgcttaggcattcatatcccagactttccagtccatagcgaaaatctcaaagtggcttaaaaacaaagtagtgactatagttggtgtagtttagtgattaaaccttgacagaaccagggcatcaggaaactgacccaggagactgcagagcctcacaatttcctgttctttttataaagttaaatatataataaatttgtttccatctatcttcaagcatctgtctactcttcccctttttctccctttgtaactctgcagttaaaaaaaatttagtagagttgactaactgaatttcatatttcatatttgaagatctacgttgaaaatttcacgtggcaagcattgtattcatttgagccttaaagtactttaaagtactttaacagtggtttggctgtgtccccttccaaatctcatcttgaattgtagttcccctaatccccacgtgttatgagagggaaccagtgggagataattgaatcatagaggagattacctccgtgctgttctcatgatagtgaatgaggtctcatgagatctgatggttttataagggacttttcccgccctttgctcattcttctcctcgacactgccatgcgaagaaggacatgtttgcttccgcttccaacgtgattgtaagtttcctggggcctccccagccattctgaactgttagtcagttaaacctctttcctttataaattacccattctcaggtatgtctccatttgcagcatgagaatggactaatacagtactggattattttctgctgtttgttatatttacacccaacttattaggaaatgctggggtagatttcttaaccagagtctctagaacattggaaaaataatacataattaaatgtgtatgaaagcatgagtgcatgaatgatagatttcctcttggcattaatcaaaaccaatagtatttttgctgaataccagaatgccacattttgagggaatggcataataagtaaaaacataatagagaagaatgtaaatttttttttttttcagtaactaatcagttagtaccaataccaatatgtactacacacacatattggcaatctaagggaggctagcatctgtgcatttttctacccaacctaatggtctggggtttggttgcaagatgtgaccagaaaagacatygtatttatagatagggatttcttttctcattgatgactgcagaaatggttaaatgctttttatgattgggtatggaaaatatatttgctatggaggtactagtaaactttgcttcttatttatttttattttactttttaaaattttttaaaaattttgagacaggatctcactctgttgtgcaggctggaatgcagtggcacaatcatggctcactacagcctcgaactaccaggctcaggtgatcctcctgtgtcagcttcccaagtagcagagactacaagtacacaccaccacaccgatggctaatttgtatattttttgtagagatggggttttgtgatgttgcccaggctgatctcaaacgcctaagctcaagtgatctgcccgccttggcttcccaaaatgctgagattacaggcatgagccactgcacccagctgaactttgctttttagatatgaaatgaagaaagtacagaaaaacaacaatgaacaaacatctgttaaattctactcttctgtcatgcatacttcagaataaggacatgaaacattgcagttgaagtctactctatcttcttccccatttccatcctcccacctcccataacagatgacaaaagcaacgtaatttaggtatatattatctccatgaaaggttttacacctacatgtgcatatatgttaaatagtttatggcataggttttcatgttttcaaactttacataaattggtatcataatctacataactggtatcattcttcaacatgattttttcttttgttcaagattatgtttctttttttttaaataaattatccagccatgcgtggtggcttgtgcctgttgtcctagctactcaggaggctgaagcaggagagtttcttgagcccaggagttcaagtccagcctggcaacatggcaacatgctaacatgctgtctctaaaaacaaataatcygtgttgaaacatgttgtctaaatcaggggtccccaaccctgggccacagatcattactggtctctggcctgttaagaactgggctgcacagcaggaggtgagcagcggacaagagatcattatggcctgagctctgcctcctgtcagatcagtggaggcrttagattctcataggagtgcaaaacctatcgtaaactgtgtatgtgagggatctaggtggtgcactctttatgagaatctaatgccttatgatctgaggtggaacagtttcatcttggccaaaacggttggggaccactgtcttaaatattccattgaatcaataacccccaatttattaatccatttttaagttaatgagcttctgagtggtttttaattatttccaatttcaagcagtgctccaactcatacatacctctttatttacctaagatagaaattctccagaaatttgccttaacatccaattgctgaattaaatagcaaaaaacaaaacaaagcccaccaactttgccacatatcaccatttgtctccagtgattgtcccagtttatatttctaccagcataactaagatttacctcttctacatatccttgccaatatttgtattttcagaggcttacatttggacaatctgaagggttataaaatagtatcttattgttaaatttgtttttccccccactggtgcctagtagggctgaacatctttcttatccttattctccatatgtttcatcttctataaattgccagttaatttccttttttccctattatatcattgttctcaataaggtatgcacatttgtttactaattccttgtcagttaaatgcattgaaaaaaatagtttcacagtctgggactagcctatctacctcattatgatgtttgttttttgactgaacaaaagcctaattttagtgtagtcaaatatacagtattagatttcctttatgattattgcttttttgtgtcatgttcaaaaaataytctgactcaaggtaataaatatatctaacagatttactttttcacatttacgtctttaactcatctgaaatggatttttctgtttgttgtaaagtggcgatctratcttgttattctacatggatgcatagttgtcccaacactgtttattggctagtcccaacctttytctcctgatgtgaaatactgcctctgtctcatagcagatttccctacttatgtccgagcttttttctgatttgtcattaccattttcaaatctttgtcacttccaatagtttatattttctagaaagttatcagtgccctctcatttttgaaatttatagacataaacttttattcttttagtatttaaaaatttgtaaattatctatagctctgtcctcctttttttccctctttttttttttttttttttttttttttttggagattgagtcatgctctgtcatccaggctggagtgcagtgacaggaactcgcctccacctccccaaatgctgggattacaggcgtgagccaccgggcccttccctcccctcacctctcctcccctccccttcccttcccttccctttcttttatttatttatttagagatggagtctcgctctgtcgtccgggctagagtgcagtagcgggatctcggctcactgcaagctttgcctctgggttcacgccattctcctgcctcagcctcccaagtagctgggactacaggcatcygccaccatgcccagctaattttttgtatttttagtagagatggggtttcactgtgttagccagaatggtctcaatatcctgacctcgtgatccgcccacctcggcctcccaaagtgctgggattacaggcgtgagccactgcgcccggccccggccacccttttctttctttatgatgtttwtgtgtcccttttccctcttttttgtgatcagactcactggaagtttaggattttaattactgtgttcaaacaatgagaatttagttctgtcagtcctcccttttctttgtttttgtatttcaccaatttctatttttacctattgctaatttctgctttctttagaattactgagtctctttttccattttaatgactggaaatattaactctttaatttttggtttgattttttttttataatatattcctaaggcatctacagcatcttacttacagttactttaacttgactctctgttccagcttccaggtagaactcaccctggagtttattcttagggccattcccagtaccaaaccaattaattgaactaaacaacattcttttctgcagagtgtgtttgtcacgataaatatgaatatatacaagttctaatttttacattattgaaaattagggcatttgcaattaccaacaacaaatctgcttttcatttttcagcaaacctattgggaaataggatgtcagtgatatgtgatctactgtttggcttcctacttccacaggatcactgcaaaacagtatttctatcattgcgaaaaattgtatccacatttgctatttgctgtttatataagcgtgtgtgtgtgtatgtgtgcgtgagtacatacaaatagctgcttttgtctggctgaccataatacctattttgttgtacttacaaatggtcctaccaccaattagctattccaatarttacacaattttctcactcatcactcactacttagtgctaaaaatggtgtcataaggaatacaacacctcaagtttaagtctttttaattaacctgtcaaagacttccctgatagttcagactatcacgtactttggtatctttacattcaggtgctgtattcactttcaaaaataaaaagtccatcagggtctgcagacggcagcatatatagcatatatttaaaaccaaagaaagaaaattctcataccttgggtctatattctacaagagaaacttaattgctatcgtcactccactttttaggtctattacttcaggtgattaggctgtttgttctaaactattttcttattactgcttcaatgttttagagtcatgtatcatttcggatctgtcttggtttgtcagttatctccctctaatgcttattgctttctttgcatattacsttgttcctttatctttccaaaggcaaactagtcttttttcacatgtctactgctactgataacactttccataaacatttgtttcgtatattctgtcttaatacctgacattatcatgacacatttgttattaatagaaatatattttccctttaatataatttttttggtcaataatttgtggaatgactggaaacttgtaatccctgcaaaccctgatgaatgttcatagctaccacccaggagtgaaatctgatcatgccactatcctgtttcacacctctgatgattcacttttgcctgtggcaaaaagagggaactgtttagcctggtcaccaggcttccacttgcctcaccagcttttcttcccatcatgaacacttttggttccgtttccatctaacatactacattccttccaaggtacgtctgcatgatactccttcagcttaatttcctggtctctgtttacaacacctgataaatctttcccatccactgcaaccttactctatgaagcctttcccagatctggtcaataccctactttgatttgataatacctttatgtaaatgtctcttattccattaaaatactttggtttgcaactatatatgtatcttttgttcccctagaatgtgacttcttttatgacaggcactgtgggttttttatacttttattgcccaggacttattaaaatgcttggcatgagcaggtgatcaataaatgtcagtgtgaacaaatgaacgtggaatgaatgaacagtcaccagtttttcttgggcatattttgacccaaggtatttaaaactaataaggataatatatttagcaaagttccagttttaaaayttcatggatagtacttttattatatcttttcttttaaaattatttcttactgaggattatataccaggagagcattagcattagatccaagagaaaagaagcttttgtattatgaagaataagctatggaaaagattagatggacagttggttggaactttaagcagtgctttcacatttacaaagaaaatgttgtgttgtttctatcaactgattttagatgataccatgctatagcaatatccttattctccctgtttctttgctatgatttattaatcaaattattattaagttttaaaatcgactacagatttggacttgtaagtgttgcatatacagaggtaaaaatatatcatctctgtcctagagcacctctgaaatatttataaatccagcttaatacatttataaattgagatcagtgacagaagtagtacacaatagtaggaacagaatacaatgcctgagatgaattgacttttaaataacttaaattactaatttcatgtaatttgaagtttaactcctgtactttttaatcaaaatggtaagcaaagaagaattacatggaaattctgtttaagtcaatatgttaaataactattatatgcagacatcctgtaattgacacttgaggatggggaataaagtacaacatgttaagcccagtcctgatttcaaacactttgccatttagatatatgtgtctaaatacttgaagctagtgtgggcggatcctgttgcctttccacttctcagccccatctatgtcatagctggctgataaccaagcctctgcactctcttaacatataggtagagcattttgttgtattgacagcctagagaatttttctgagtttttgtttcacgtgtttgcaaacaccgaattaaattatgaatcaaataatagtattacagcttttaatatcagttatatacgaaatttttatgaagggcaaacattaaactctgtttaataaatagactatatataggggttggagggtgggggctctgttcgatcaacagtatacctagttgattacttaaaaagttgtaaatggcccttgactcttagtagcatcttttaagtttccctgttgtctaacatgaaaataacttcatatgatcttattcatttttcatggtgaatattatcataagaaaactattggcaatgcatcatatctgctatcgtcttgacatgatcatcttcacatttcaagtgtgtatcctatgtacagaccgatagcatgctaagaatctgtatctgtataaagcgcaatgaaattaactgtaaaattctaattttaattaccagtttatttgctctgtattcaacaaatgtgtattgcatattcagaagaatgaaaggaagatgaaaaccatcaaagtccttctcaattatgtgtagagactgatggacacacaggatttcaatagaaaaggggtccttaaacatcagtacgcatcagaatcacctgaaaggcttgttgaactacaaatttctgagtcccacatccctagagtttctgattcagcgggtcttgagtagggccygagattttgcatttttaatgagttcccaggtgatgcagaggctgctgctctggaaccatcatttatagctactgcagttgagtataagtagaataacaaagatgtattaaagtcgtttccagaatagagacaggcaatgctcagtatgttagagaagtcaggggaggctttcaaaaggaggtaggatttgattgaagtcttgaaggatctcttggtgagagagatccttaacaagagttaaaggtaggctgggcacagtggctcaygtctataatcccagcactttgggaggccaaggcaggcggatcacctgaggtcgggagttccagaccagcctgaccaacatggagaaaccctgtctgtactaaaaatacaattttttctgggtgtggtggcacatgcctataatcccagctactcgggaggctgaggcaggagaattgcttgaacccaggaggcggaggttgcagtgagccaagatcacgccaattgtactccagcctgggcaacaagagcgaaactccatctcaaaataaataaataaataaacaaacaaacaaacaaataaaaaataaaagagttcaagttctttcaggcagcaagaatggcatatgctcaagtgatgtgtattcacagaactctaatttagctcagattctggagtacaggtcatggtggggagagtggaaaaaaggaagctggagagtttgggtagtctttgaagcaaaaagacttgaatcaggaaaaccttagtaatatatttgctgttttgaagcttggctctagctgcattgtggaaggagaatgrattggagggttttagtactgaagttaaaatagacaacaggtgataaaggtccagatggctctgctgacagtgggattggcaagaagagatacacagtaactcaaaaggtagcatcaatagcagttgaatattgccactaaggaagagagtcaccaaagatgctttctgggttggcattggtttggtataggtggcatacactgagattaggattgcagggaacatatctgtgaaggtttggtggtagggaataatttactttggctctgttgaattttgctcttttcaggaaacatgcaactagagatacttaggaaagagacacggatatgcaaatatggatttttttttttttttttttttttgctgcattagccttgctgtagatcaaagacaagattaaatatctatatacatgtatgtgggtgtatatatgcacacaaaaagagaactacacataactctaattattatgaccttaacctgtagaaattttgtttactttggttttacaatacaaccaaaatgtgaagctttaggaaacattggaaaagacataaagtataatagataatctgtaaaaatgcaaatcatgaccataaaagaaccattatttctccccacaaatatcagtaagagtctttcattgtatttggaagtctgccttaaatgcagaattatttcaggaagttcaaaatggccataaaacaaaacttagtattatgtgtttatagttattataggtattgacattattttttataaatatgatagaatcaagaattgctgcaggtattctatgccaacaattggttgaaaagtgtgcacattaatatttaaaaggaaaaaaaagccttcaataatcttccaacacttcaaggtttggtgttataaggatagataaacagtttgtgcaaacattatttgctcccaagctttcatgcatactaagtatcatccattacaacatgtggggatttaaaggctgttaggactatctcatttgtaaatgtaaactgacctaagttatttctctgctgaaatctttgtagtacatctcctgtatagcagagtcgattatggagttcagccctctgaggaagcatccctagctagtctttgcatctttggtaccctgtgcagtgtttagcacatggtaggtactgtagttaataaatttaagttaatgcatttatgacttagagtcactacatttgttgcacaatttcccatttgtttttgcaacttaaactcattttgaaaaactgagcagttgcttttttcctttctgaattattcttgagcaaaaagtgagccttcttgtttttctgacattgtaatggaaaatttatggacttaagtacttcattgttgcttaccaaataaacgaatatatctcttctgcagccacgtttttgcagagacactggtctagattatcgtctggtaaaatccatagggtgagggaggtcacagtaacgaaggatacttactagcctgtaatttattttcaagaattaagacagcaacaggcaaagagttcaccagcacatatgaattagtacattggccactccgtacagggctatttaatgcatttgatatactcttagaattaaattgctgctttttctatgaaaatttgaagtaagcggttagggactaaaaagaatacttgagtgtgttggtactggatactcaattcactcagaccctgcttgaaatatataaatatataatcgcctttttccttttctcatgaacacaagtgatttgagttaatttcaggaacaatttagcttactcttggtaaatgatatataatcaccaactttaaaaacttctgtttaagtagaaggtcagaagtcttgtacttgtttgcagcctgaactacttgaacagctattcgtagagtacgaggacagttctgtaaaccctctgatgaagtgtgatctatttgcaaacgcgttaatgaaatagatgaccaaattatcttgtgcctttattgccaaggttgaattaatttgcttttatttgtctttatttatatgatattgattttttaattaatgaagccatttcttcttgggcatgcatattcttcctttttaaatttatttttacatttgtgactgcttatgaatctcagcatatcacttcattttataagtttgtttggagttcagcagtgagttgtttaaatgggattggcaattaactaagcaattaattgagttttaatagctcagggggaggaatgaatgtctggctgaagatggatatttattttactgaatgaagaaaaatgaaaagaacccacaggaaactatgccttgaactttaaaagtaataacaaagtatgtggaaagtgcaagaaaaatatttttcttcttagtggttagcctttattttgctatatrtaccaccaaatatttgatacttatattttgctatatataccacctaggtgttttccagctgctgagatacagtgctttaatggacattttattgcttaatgccttttggtgtttaatttattatacattattttaaagtgttggaccaatttttagggcctcccaactatcatcatcatgaattaaaatgttcagatgtttttatcagaggacaatattataataactacaatagtagatgatgtccaaaatgaatagtttaaattaaaataatatttattgatagacagtgccaaagagtgttcattatggcgtattatcagttgttaatagtgatgatcatgattttggtaattttaagaagcaactaccattttcttctagtcttttcttgagatgaattaagacatgtttcaatctgaaagactaaattgtgaatggcatagcatgttccgtgcagtatctgtaggtattaataggtttgcacaggagttgagatggagcaataatagaatatgatataaatggttttgtactgaggaggaaccagaaagtccctggaactgccatttcttccaactatctgaaaatacaaggatgaataattagtattaccatagtcagccctaaatgaagttaaaatatgcattagagaaattattttctgccaagcttatgcacacatgaattctaaaattgttctaattgaaatataaacaaattgtaaatattaacctcatttatgttttaatcataatattgaacactggttacaaaatgttctgcataggtaaaaatgcagaattaagagtaatgttccataaatactcctactgatgctttttttctaatgtgataaaaattatgcaacttttttggataaagagaatattttttatcatttttatgttatagggagaggaaatgaaacaaaggcaggcttgtgaacattagagatatgcttaatagtcaagaaagatggctccatctattttaattgagaaaaaaatgaattctgtctggctttaagccagttttaatattaacaagatttatctggctgattgccattgacccagagtgaactgacttgtgaagagtatcttcagtattgtttgagatgatccagggtctccccaatttcctaacactcaagaaatttaagtctgtcttcattctgttaaagcagtgttctattatagattattttaaaactactttgcctatcttttcatttcaggaataaatatattaaatacatactggaaataaatatgtatatctttagtagcaccaatacctttctttagttatgtaagagaataacaaaatttgcacatcattttttagaatttttggaacgtattatcagcacatgttaaaatggcagcactgagttgtcatgcattcattcatacctagggctttagaagtagcaatacatagccagaggtgtgaaatactcatttgatttggtatttctagtcataggagtttaaattgaggattcaatttgatagaaaccaacagatcatgaacaaaaatatgtagcataggagttgctatgatggcaataaattataatctaaatgtactttaccagaataagaagttaaaatatatcaacaacgttgaatatttaaccagcttttgaaatgttaagcttataataacagtgtgttgaaactttggaaatatttaggatatatgtgaaaatagaatcatgcaaaccaatataatcagagcaccaagtatacacagtaatatgaaatatatggaaaataatatgcaaaatatggtaagttaggtagtggaaatgtgctacgttgttttttatttttttcaagttaaggagtaacactagacttcctgctaggttttgatataatctatttctgaatgcctccaatgaggttgactcaagtacctctctaagcagttattctagtgcctaattccccttgaagaatttttgtgttgtctaatgttaatttcttcctttttttagctttagaccattactcttcatttcagctttctattactattttaaaaatagttttataatacttacaaattcctcataattgcttttttccctaagtgaagagtttccctgaagtcattttatgtgtgtaactgccctgtggactcaggtcagaaagtcttgtcactgcactcatgttaaaatgccaagatctctatctttggatcataaacctgggactttttatgttaagagaatatcatggaagatatttggaagggtttggttttgctttttagttaggtagaagagtccttggaggctatattctgactcttaattttrcaaataaagaaactaaaatggaaagattatgcttttgggtgagccacacctaatttatgacaaactcaaacattcagtccagtttaactgacactcagaacttgcctattatatttaatattaaatgagctctttgagtgctacctgaatatatttctaaattacgtgaaaaaatgcattttgctttgcggtgtcaaacagagttgccacattttggctttaatatctatatcatcactgtacacattacttccgcatccaccaactttaattctttcacagttttattccttcctctgccatgcaatcatcctgaaagagaccatgaccaaaccatcactagaaactttcctctcttgatgctctgaatgagttttggcttcatgttgatggactcttatcagaacatgctcttggagataatgggcaatttccgcagctccaggagcagtttatttatagtgtcacagggttgaaggctcaactataaggacaaatcacaactgttactatgcattccccttaaaatgaacaaatggaagaacccacttacactatctatttattaaatattgtttttctaaatctgaaagtgaggtatttaggataaattctaatatggctttgctcagttgttttatattcaacaaaatagtaatattgcttttctcagcaaggtttgtgaagaaaaccattgatttttggactgcttaactaggcaaaatgcttatttccttatgtttatgcatagatattatcagccaaattgtcatggatgattttgatggtgttctgcatgccaaactttagaattctcagttactggtctttgtttttgttattattttaaatttctacttagtttgctgccatttagatgtctgagagtgcatgttatggaaaatagcgtgtaattgttagctatgaagctttgtttttgttggaatcagctggccctgcctcttaagggagaccctaaactcttaagtattcacaaggcacagtaagagagtgaacaatagaaatagaattagtaggaaagtgttaaaagagaagtttgctaatgacaacaaagcataacttgttcaactctggtgataaacaccaaatgggcttattgctcaaggtaaaaattgataaatggaatatgccgtggaagctcgtgagcaggagtactttgcccatacctgtgggcactcagtggaagccatgtgagagcttggtgcttttatgtgttagcctgtggaaacaatttcacttctgaaatgcttcaagagtgtttaagtataatggactttgtactgcctgcctggtctgtaccttgtagagcgctctcagcccattcagcttgaactccattttatctagctctttatccattaattttctcctgaccttgggcataaaatatatgtgctttttatgccatggtgctttgtgcagacaaagaggaatagcattaccaatccatcaccattatgaatgatacagcttaaaacaaacacaggtcagagacagatattttaagagcagatctgtattgattccatcacaacattgagctaaaaggaaaagaactctgagactgtaaatgatgaagtaagttttgacaaatagccacaaccatgcaagttgacttaagaatgtgcctaacgggcagtcattggtgtaaaaaaaaatgtatttgttattattaaaacctacctctcttaagtgtatttattaccatactttacacaccacattttaatgtgctagtgttttccctttcttgttgttgctcattgactcttgaaagcttttttgttaaaggaaaagggaagcttattaaattccttaatctttattaaattgttgcttttgaaatacttaaactaacctttaacagtaggtggtggcttatttgttttgcaatttagttttgagcacatcttgttaggattttgaaagtatttgtattgtggcaaatagtatgttactgaagtgcaataaattatgaggagtgtatttattatgaccattactgttaataatctcaatttacatataaaaatctccctatttaatataatgaagtcacatatactascaaattatgtggtctcaacccatttttcagtggttgaaattctaatggactcgatctctgctataggaacagtcattcttgctgttgtaagaggatgcatagtatggtggctgatatctacttatgcgatggtgattgtacttccactacaacttcattacggaaactgtggtttttctaacagttcaccgcattatgtacccaaatgttgttgatatctgctctgtatttttcagtttcccaaatctgaaactttcattatgtataacaaaatatccaaatattgtgttgtattagttttcatcatgaatttataattcaaatggaagttttacaagtttctaattagtatggtttttttccaatttatatcttccttaaaataataaacaaactttctttgatagaggtgattcttaagtcctttcttttagggatgtttttaagcagtggaagttttaaagtctcttttcttaaggatgttatatgactgctcagtttagataaatgaaaaggaatcgataagccaaattgcaaggtgtgattctttttaattttcatcctttgaaaataaatcactaccagatggaggggactgtagacacaccaattgttgaggggaacggagatgtgtgataattggaaggcccaattttttctccagtttttatggaagatgttcctcctcaaagagaaagagttcttctgaggtagaggttagtaaagttcttcccctctctgcctgtctgtagcagaggactataggcattttcattttaacattaatttctgcattcataatttcaagcagtttggaggatgattgcctgcctgatatgatttgggtaacattggatagaatgggcttccttctgcaaaatattggtcttgctttctgtaaccactagcataaccttttcctctggaagttttaaggctggaagagatagcggttcttggggtgggaggagttgtaccctccttgttagagggtatctaaagagagtttcacctacgtgggttaaaatgaactccctaggctgaagaaagatgtgttagtttgggagaggaagcctctggaggtaggaaggaaggtttttgggagagagaataaaacattgacaacaaacatgattttgtttaaagtcagatgtgtttttgaacttaaacttgggaagcatatttctatataaaagaaatgatgttagtgtttgtattgctgcatatgaagcattagatttgtgctaatgacacacaaaagctcataggtgggcaactgagtattaccatatttactttaggcagcaccgagaacttagaagaccaacacttatagacattttctaaaatattcatatttatgaattctgtagaaaatggagactgttatgcctctgaaagaaaatacttgcagaaaactcaggtttatactggaggtttttatttgacttttgattcaaaaatcagtagaatttgttgttgtaaccagattaaaaataatctaggctgtctaatagtgatatagaaaattaaatctaccagacacatatagccctgacctttctctcctactgaagctgagaatgagtctggtgtgttctcttaattgtgttttaccgaaggttaataatcagcctttcaaaacttcttggctcaaaatccatttagcccagatgtctctagcagcttaattaccaatttctttataggtgatttaggagtaataggaatgaaaggttccagggagatgatggctaagtcattgctattgacaggtaatgtgtaagttgctgtcacattgccttgaaatcactgttagtagagagggagggagggaggaatctgccacagtattcatgaaattcttggtcctggtttaatgtctttgagatttggagacccaaagaataactccctaaggttttgataaatggtattaaatgtaacttagcatctctgcaatgtatagaacacttgtatttaaaacattttgctgactaaaccaaaatctattggatttttaaattattattaatgattaatttgcagtatttagaatataacatgtttctctttctattataatggattgcctgtaactgtcagcctctgatacatactaggagaatccattaaaaatggttgacagccagttttgttaaatttccgtgaaaataaggtctcatttctaaatatatattcatagtgatgactttaatattttagtcttcatatagaattaattaattcaaaaatgtcacagtatacaagaataaattgtgtggcttggaatctgaagacctatgccttgatcctgattccatgaataaatgtatagaacctagcttggtcatcatatgttatttgtaagagagagaaataagactaaaaatatctataattacttccagcctaaaggttgtatgattcattcattcattgaggcatttaaaaatatctactgtgtaccaaaaatactgaatttactgagctcaaagagcacacagtctagaataggagattacacgcaaatataactgaattcatttattcataaaatattgagcagccactgtggcactgaggcctagcaaaatgctggaaataccatgatgactgtgccattccattcctcaaagaactcaggtcagtgagaagacgtgctttcccagatcactgcaatgtggtatccttagtgaagaaggacatgtgcccatggtactatggaagcaggtgagtaggacacgttaacaacaccttactcatctgaaattggagaagaggtcagggaagattattttggagaaagtgactcctgagctatgccttaaagaacatttgtctgagaggagggaacaggattacaggcaggttgtgatatttgaggcagaagcaatagagtgaatgaaaaataagagcagccttgaagcctggaaaaggcaggtaccgccaaattcatcatggaacccatctgcattgtttgtgttttttgcatttctggtagttattcattgcatcaatgtgaaacattgtttataaagtactgataaaatattgtgtcatttaggaaagggagaaattacttacaaataagataaataggagagattcgttggagaaggtagcattcgagaggggtggttttacggagtttatgtgaggagagatgtaagaaacataccttgcaaaagggtatttcaggtgataagaaaaccccaaatcaagaatgaagtttttacttggagcagcaaccaggactgatgaccagatctacccaaggcagtgtccaggctggagactttttgagaactgcaacatttgaccatcaatataccttgtctagaatttttaagaggaatgggctggaactatgtttacaatcactttttatcttaaaatgtatagtttctgggtaattcacaatggatatgaatttgactccattcttatttggcaaataatcatgagtgtctaacgtatttcagtctcattgctaggcgctgaggatcaaatatgaattggataatcctgccctcaagaagcttcagttagtgagagctactggtgatctactcagatctgttccttcaactcttgccctactcagaggtgaagttatggctataatgaacattgctgttagggccaacctctgtctttcactaagctgtttcatactgaggatattatcaaaataggagggtttaatgatcagcttttgatatgctgttagtcttatagttcaaacagccaaataagggatgtaactcccaagtatcctagtctgctgtctgttacttaggaacatgagtgaagaaaacaagagaggctcagctattcgtacagatttcgaaacagcaattctttgggtggctttcttcttgaagtagaaatacacctaaccctagagcaagcagttctcctacatacacccctcttcatatgtttctaacagtagcttaaaaaactacccctgccaaagagaatgcattggtctataaatgaaacttgctatacacacacacacacacacacacacacacacacacacacacacacacatattttgcattcagtatatatcttttcagcggaagtattttcagtttctgttccactggtgattttgttctataccagcttacctgggagccctggtttataaccttcacatatttgatctataatacttcaaaaccagtcctgaggtacctgaaatctcataaaatttgtcttcttgttttctctctatatacaaacagcatttgaactgcaactttctatttctgtaatattccatggttccaaaaggtatgcttttgctattaatgctattaatgataaaactttgatgaataacktaccccagttctttttgataagcgtctcataaactatgcagaacaattagccagaaaggtgaaatattttaggatctttagcagtttaaatttataattaatggaagaaactgaatcttttgttgtattttttcttttttccttcctcttgatgtccattttagatgtgctctttttcatataatttttatgtcaagtatggtatttccagtatttaaaaaccaaatgcacctatttctgtatggtagcaacaaagatctaaaacgtgaagtgtcaaggggagaaaacatgggaggcaaatgtttcctgaaacactactcatgcataggaattacatttcaaattcgagtctaatgcaatgtgcagcatttagtatttgataacaaatgaatgttatcctttctgtgggtagtgaattaatagtttatttcttaagcaaccaaatatggttctcacatgaaagcagtctataggaaattactattctagggaaaaaaaggtcaaatttaaaatagcagttgattacatttcaaacttcattgtgcgaagagttgtcatatctggcagtgtaaactcccyggtcccccagcccacccctttccacacttcctccctgttcctgtgaccatgatttcttatactcaaaaccactgcggttagcttgaaactccacgagcagggagcagattacatggccacatgttcgtctctccccgtcattgagtttttacttctaattttgtgagtagcttcataattactttcatttgagggcatttttcaatgaaggagcttttgtatttctagagacaaattttgctgaggatttttatccaaccagtggctacattttgagaatctcatgatttctttccattttaacacttacaatgtggctagcatggattaatatttattttgcttagattatttaggccctttaaaaaaaactttcttagactcttccctccaataagtgaatgcacaccaacccaccatacctacatatgcatttggataaataaaaatttccggagattcttgtccaatcaagatcaatgtaacatgacttgattgtgaatgtcaacttttaatttttttgagacagagtcttcattctgtcgcccaggctggagtacagtggcacgatcttggctcactacaacttccgcctcctaagttcaaacaattctcctgcctcagcccctgagtagcgggattacaggcacgcactaccacatctggctaattttttgtatttttagtagagatagggtttcaccatgttggcctggctggtctcaaactcaaactcctcaagtgatccgcccgcctccagcttcycaaagtgctgagattatatgtgtgagctaccgtgcccggcctgaatatcaacttttattttaaaaagattgttgaaacacgcctgatagtatgtgtgtatgtatacagatgcatcatgatttttgatgaggttacatcttgataaacccatcataatttaaaatattgtaaatcaaaaatgcgtttaatatgtcaaacccactgaacatcatagcttagcctacccaattttaaacatgcttagaatacttacattagctaacagttagaaaaaataatcaggaaacacagtacactatagtgtattggttgcttatcctccagatcatgtggctgactggcagttacagcttggatctgctgtccagcatcaccagagagtatcgtaccacatatctctagcctgggacatcaaaattcataattcaaagtgtagtttctactcaatatgtattgctttcgcaccgtctaaagtttgaaaattgtatgccgaggccggttgcaatgcctcacgcctgcaatcccagcactttgggaggccaagtcaggcagattcacttgaggtcaggagttcaagactggcctgtctgacatggtgaaacctggtctctactaaaaatacaaaaacttagaactgagtgtgatggcacatgcctgtagtcccagctactctggaggctgaggcacaagaatcacttgaacctggagggtggaggttgcaatgagctgagattgtgccactgcgttccagcctgggtgacagagggaggccaaggcgggtggaacacaaggtcaggagttcaagaccagcctggccaacatggtgaaaccccatctctactaaaaatacaaaaattagccaggtgtggcggcagatgtctatagtcccaactactcaggaggctgaggcaggagaattgcttgaacccatgagcagaggttgcagtgtaccaagattgcgccactgcactccagcctgggtgacagtgcaagactctgtctcaaaaaaaaaaaaaaaaaaagtctacatcaaaactttgtaagtaggagaccatctgtatatgcatatgtgtgtatatatgtatagatacttattgagatacarttgatatgtgatcaactgcacatatctaaaacatacagtctgatagttttgacrtatgcatagacctgcgaaacttcaccacacttgtaattcctccatcttggctgtctgtactgtagcctcaccaatacgcttcccaggcaaacagtcatcaccctgtcactatatattaatttttattgtagacttttatataaatgggatcctacaatgtgtatactcttgtgccaagctgacactcaggcttattatttctatattcactcatgttgttcaacatatcagtagtttattattatttattgccaaatggtattccattacatggatatatcagtttatttatctactcatctgccttttcaacaattggtgctggaaaaagtgggtgcccatatgcaaaaaacactaagtttgactcattccttgcaccaaatacaaaaattaactcacagatctaaatgtaaatcataataccataaaacctctgcaaaaaaaaaaaaaaagaaaatctttgcagattggattaggaaatgtttttcagctacaacaccaaaaacatgaatcttaatgataacctacattgcattaaaattttctcctcaaaacatattattggccaggcacagtggctcaggcctgtaatcctggcactttaggaggccgaggcgggtggatcacttgagctcaggagtttgaaaccagcctgggcaacatggtgaaaccccgtatctacaaaaaatgtaaaaattagccaggcgtggcagcacatgtctgtagtcccacctacttggaaggctgaggtgggaagatcacttgaacctgggagttcgaggttgcagggagctgagattgcaccactgcacaccagcctgcatgacaaaatgagaccttgtctcaaaaaaataaaataaaataaaataaataaataaataaattattatgagaaggaaaaaccaagccaggaactgagaagttttcaaaaaatacttaattttttaatcttagaaaggtgacaakataattaatattgtcatatgtactttatagaatatagatttagcttaaagttttatgaaactaagtaaactgaataatgagaattgagagtccagataatgagtcctcagtacttttacaacagaactatcttatccaccttatagcttattgatgcctataggaaattctgttaatcaaaatgggaaaatcagaatctgtcactgtcaccattttggatatataccttcatcttcaatctcctcttgcttcaratgtatcagttacatttgtttccrtttaacagcatttccaattgatattaggttattcccagtttgtggttaaatggtaggtctttaggaaacatctttttaaactctagtaggactataagtaacattctagtgatgtgacatgcattttttcaagatggatggcatttaaaggagttatagttttgcaaagcatctaactttggcactggaaacatttagatcactaaatatatataaatatatatgtatatttggacatctcaaccgttacccttaccctttacaatggtgccaacactgctcctgaatggaaaaaaaaaaaaaatccaaggatcctttcctaaagactttataaaaataatgaattcttgaaatttgaatttatatatcactgaatcactgacgcaggaattttctgacaatttgcagggttccagctggtgatgtgccctccactctccaccccmcctcacccccaccttgctcagccctgggcctgctgctggaggcagtcagcccgctgagtctcgcttgtacaccggcttggcccatggctgagctgggtgcaccctagcccacctgtgttatagtttgtactcacatttgggggttcctgagctcttatcctgcgtccaagaaaaatgagggtaggctgacagttgaagggtgaggatgggcagagaagaattttattgaacaatggaacagctcacagtcaggggcagcggtggggtgggaggattcctcaccccttcagtcgggtggtttttttctcagtgtggctgggtctggggctttttatggactcagaatgaggagtatgtgctgattggtatgtgaatattcaaaaaagattaaagcgaagacaccactcaaaggtgggcaggacagtgtagaaaaccaattaggaaagggtagggataagtaaaatacatgaagggtggggatcaatcagaacaaagtgcaacaaatgggaagacaggttctcagtctggtccaaggatttaatttttagcttggctttcaggctttaaactgtcttcagtttggaggtggagtttaaaaggggatcctgccccatctgactaggcatttgactgcctcctttcactgtcatcaccatgtctacggagtgttttttttttttttaaaggaatgcctttctgcatctttatttacacttaggctaaagagtcctgaggaatttgtcgtttgaatccagcctataaactgtaacctcaaaaagacagatccatttgccagtagagatttccttctaaacactggataaccctgttgtgaagaacattttatgctccttatacaggcacagcatgatcattgcatcactttgagaaaccactgtttaccttaaagtctttaaagggtcctgtttgtttaatggttgggtgtgggaagataactacaaaggtaattcattctttccattgctatgtcatctgcaattcattgaatgactttgttcagctcctctgcagggttatatagctggatactcatctatacatacatttttttaaatttaattatatgttgattactcttaatatgaaagagccttgacaatgaaacagtgtatatatgtgtgtgtgtgtgtgtgtgtgtgtgtgtgtgtatgtatttttttttaagttggtactgatcatttgacttgcctctgtctaaattacctgtattgttttcttccactccccccattttgcatttggccttgttatcaacaaagttttaaacttggttatggacagatagatcatgttatctcttaaagatttgcatggagtttaaaaattcatctcatttttataacttggttgatcaacatgtacagattatgattttttgaattgagagattataaacattgttcaaattataataaacccacaaaaagcagaatgattacttttaaggttatatgaatagaggcaagcttaaaacataattctttcctcactaagaaaagaagtaaaatcagttttggatttacttctcccttgatgttctgcgatcttacttgcttactgcatatagactttcctaagaaattcctcttaatgatacagttgaagatagtaggaatgaaatcaatacactattactttgttggagatacacaaaggttttcaataaacactattctgcaaattaatgttaattgctctaggtagagagaaacaccttatgaagttggaagctatccatgtacattgataatgttctttgagagtcgaaatggtgttctttgaagctgacttctcatgggctagtaaattaaagctgtgagagctaaactgtgatgggctcaagcaatcaacacaggtgtcagtttgaaaggtgatagagggattcttttgcagccccacttgatagcacctttctgaaagttgtgactgaagcttaggcattgggactgttgccagcatggttctgtgtgcagaaaaggagtgaatctgttgggcttctcatccttgagaactgaaatttattactttgtcctcatgatgggaacatccacaaaggatggtatttaaggatgataacttctggtttctctattcagatgaaataagcataaacctagcccaagagcaggtttcaaagtgatagtgaattgcattaagtaaaatttgattgcacatgatacaatatgaacatttgaatttttaaattgatatagttcatatttgagaggtatatgtgatatttcgatatctgtatataatgtacaataaaattaggataactgggatatttatcactgcaaacatttctctttgtgttgggascattatagttcatttcctctagcgcttttgaaataaacaacgaattactgctaagtataatttttctactgtactattgaatgctagaacttatttcttctaactgaatttttgttgattttttctgcattaattttttcttttctgggaaaattaaaatattatgtcatctcagtcagaataaaaacaatttggcataaaagagatagaaacaagtaaaacttcagttagctattagactatgtaaatgtaggccaggcattcagattttaaacgcagttgtacttcttgtgaatattattattttgagtgtttttgtatttactcaattaattgataagttctgatgaatatatattacctctaaaggaattttgaagtaaattttaatttttttagaatgccaagcaccattttgtggcaattaccattttatttcagttcgccattgcatgtaagtcaagtcatgattacacgtaagataaggtgtcataaaggatgttcaccctattttggtaacattaatatgaacactcaccataaactaaatggatagtgatgacaactgacctaaaataatagacattttttattagataacggtttgtacaatagcccaagcccgttgactgtctgggttctaggcttcatctggcctgccatgtaaactgttaatacgtttcagagagatgaaaatctgacacatgtgaaaaggctgtttctgagctctctccatcagagcaggcctgaaagatgtccaggctatttcagctctctgggaggtgctatatggggaatccaaggttaggatgtggcacgtggcatggctctgtgagacttgccttgttggtaccacatcctgagagggaagaaaggagggagagtctgttactgcttcttggtgatgaatcactattaggaaatagtacaggtgaytcagctcatgtttattcttcctggcaaggctgaatgaaaaacataaaggagagaagatatagaggaagaaaataaaacatctttagttgtctccgtttgcataaggaaatagctaattaatgatcctggaggaaatccttgagtattcatttaaagtttaaaacagtcaaacctaggtagggaggcaaggcctgctttgtccgtctctctgtacctctcatttttaaaaattgtctgacacacatcattatttctatatcgggaaaagaatcaaaggctcacttattgtagcagaaataatagattaattagttacataattttttttcaggcttcacagttaataaagcgttctctaaatttatagtggtggcttaaaggaracaaaaaaattagagtaaacttaagtaagtagaaaatgatctttacttctatgtttatttccttgtttcttgatatgtatacctacaaatttataaatttatatatatacacatatatgcatatgtgtgtgtgtatatatgtgtgtgtgtgtgtgtgtgtgtgtgtgtattttgtttttcttttttttttttttttttttttattgagagacagtctcgctctgtcacccaggctggaatgcagtagcgtgatctcggctcactgcaacctccgcttcccatgttcaagcgattcccctgcctcagcctccccagtagttgggattacaggtgcccaccaccatgcctggctaatttttgtatttttaatagagacatggtttcgccatgttggtcaggctagtctcgaactcctgacctcaggtgatccgcccacattggcctccgaaagtgctgggattacggggatgagccaccgcgcccggcccaaawatatatatatatatatatatgtatttacaaatgaaaaataaagagttttgtttctaaaataagtttcaaaattggaatggactagaataggtatcattttgcttccaataacagagcatgacatgtattgagttcttgctgcatatcagacactgtgctagtcttaggcaagctgttgatttcaggaagttcgctctcattagtaatgaccgttgtcaagaccactgagtaatcttcaatgtattcatggcgccagagtggttcatcttcatcaaggagtaggttcccctgtacctcggctaacagaagcaaactgcatcactctgtctgcctcccttccactgtggccctgctctctgaatgggcactccttcctctcactggtcctcctttactgtataccacaaaccacttcctaataatcaatttcagctacaaattgtgctgatatgaaacaaccaatattgccaatattgtattaatttatataatgggagaatttaaagatgtatgtgcatataaggactataaaggtcaactcgggaccttttattggcttgtctttctaattcattaggttactcaccttgtaccatcaatgaaagacatgggttcgattctgtcacctatgctatctcttttagcctccttaccaatccagatgctgtaacttcaaatattttctgcttggattcttacactttttttacctgtcaaaatgataaatttgtacattctaagacagaataagcatatgtaactaagtgcatagtgaaagtgacctcttataatatagcaaacccttgtatatatgcaagtggactccttggataggaaagaaatgtgtggttatattaattaaatgcatatttattctaacagatatataaagaaatataaaatacacaagtatgtgtacatgcagatgtatagttagcctttgctaattaagtgcttttagcacagtatattttggtggccttgaatatcctctatatactttcagccatttccaagcattagaaagtccatgattggccacagatttttgttgttgttagtgtatattacacatttagtcacagactgttagaaaaacattcatggttaagtttactctggtgttttgcaacagaatttcaactttgacccatagtgagtaatcaaacatgacccaaattagttatgacatatgctctggacatagtaaagttaaatgctgcctaagagaccagacttatatgcacaaaatgcctttaatctgcmtttcattgaagagacctttgaataaatttttagctttctcagtgacagagtagtgtaagaatgacagaagtcttaagcagggcgagagagcttgaaattcttgccttctgtgctgtaaaacaatgtaacagcccagatgttttcccaaagggtagcatgctctttccagatccgccaagacacattttttacatccatctgtccttgttccacatcagagaaatgaagatgtcttcacagatctgcatctgctctgacccatttctgtactcccatgcttccccaagggtgcaatataaagtccaagatggaccttgacccgtggtccagtggaatgtttatcagtcttcttatttgttgcccactttcagtccatctgcaatctgtgctccagtgcttcccctacacgtgtagactctctttctagatgtagacaaagcatccttcctgttacttcagatttcattgacatcctcattgtccctgcctgactataggaaactgcattctaagttgtgtctaaaataaaaaccagatcccattttggagagatgtccaaaggaagatgatagaaagccagaaggcagcaaggctgatgatactgctgccatttaaagactgtgttcctctgagaaatttggatttagtgtttaacatcaaattacccatggggaaatacacatggactcatataaaaaccttctgcattaactctcagcttcccaaagctaacatgtggttgattaccaagtaagagtttgtttgcttttactcccttttagtctttttggttttttctctgttgcccaggctggagtgcagtggcgcagtcacagcttactgcagctttgtcctcctgtgctcgcaggatcctcccacctcagtctcctgagtagctgggaccacaggaacacactgtcatgcttggctaatttttaaaagtctttttatacagacagggtcttgccatgttgcccaggctggtctcaaactcctaggctcaagtgatcctcccaaattggtgtgattacaggcatgagccaccacacctggcccctttgagtcttaaatatttgaggaggcatctgacttattctgggaagttagtaaattataatagaagaaatgttattctcttgatatagtaacatttagcaaattagaagcaagtatctggaggaacaattttttatatatatagtgtatatatacataattggattttcaatagctaagtcatatatactcataagtacaaagagacttaagtttcaacttgatggactctgatcctggatcaccttactcttccaacaccaaagcccgtaaaaatgatagaaagcgtataaaaacacaaatatgttagtgttttgtggggtttgcaggcttctgtgtgctgcttcatatatttctctgacagctctacagtgcttggaccaacaggtcaaaataaacaaacgtgttggacagtgaatgaattcttatcccaggattagctttctgttttttagcagaaccattataaaattgtatttctgtttatacctagccatctaaatttgcttcaatagcctggcactcaaagtccatttcttagcctattaatgtgtcacaattggacttagtatggcctctgtgtcagtcaaaccacttttcttctttttatggggtgatcatatacctctctgtgttcccagcacatgctacactccaagtttaagttccttgacccaaaggatatttatttatagctcatttagaggaaaacaaggactttttccctactttttactttcccatatttaaaatatttctatattaaaatcaatttctgtgatatcaaaacatgagaataatcatttttttctatttctagcaatatcagatttatttctcttcctcataactcagaatcctccttgttaacaaagcttttatttattttttaaatccttccttccccaactataatctgtgggttttgttttgttttgttttgtttgagacagagtcttgccctgtcgtttaggctggaatgcaatggcrtgatcttggctcactgcaaccttcgcctcctgggttcaagtgattctactgcctcagccttccaagtagctgggattacaggcgtgcaataccacgcccggctaattttttgtatctttagtagagagagggtttcaccatgttggccaggctagtctcgaactcctgacctcgtgatctgcccacctcagcctcccaaagtgctaggattacaggcgtgagccaccgcgcccggctaatctgtggtctttttctctctgaatttcgtaagagactggccgccttcttttttgtaccatactgtaggtgctccatctccttaagttaggatagaatttacaggcaaacaacaaggtcatagcttattaaaatagggttatataggttctctgagcataagaagaaggttcttatagggctttatggttagaaaaagagaacatacattttagacgcttgatcttagccaaaaggctgagaagcgatgagagcatacattttagaatgctgagtcatgtacctgtcataaaggtatactccagttcccctctctcatttcttttctatagctttcgtatttattattactatctcctggtagatagtgtagttgattgcatagggtaagtgtccagtaaacgactgataaataaaggattgatttaattattttagagtggaattaatgcattccactacttcaacttatcagaagatacatgaaagcaaaccaaattgctccttgttttcacgccacgccaggggactcaggcccactgtttgagctctttcaagctgcttgaggtcagagcaactccacattgactattttctgcttccgtagagggtttctactctgtgttttcctttttttctttcactaatatttctataaaggcacagtttaacaaaaactgtatcatagcatttttaagttgatttgggatccgagtttagttgtaatctatagggtgccataatatactttgtaaagcaggtcactagtgttttgctcaacttttggttataacaagtttaacccagcagccattctaacgattcttcatattctgtggttcagctgggcagttattctagtctgggccagctcaagtgatttatactgtctctctcttgggtctgtggtcatgtggcagggtagctgatggctgggtaatgcagaatgtgtctgggatgtggcatgctattggctctagcaacagaggcaattgttctccagaagtgtttgtcacacagcggcagtcgtggggctcacaagcagccccagtgctagtgacttgccaagtatctacttgtgacacatttactaatgccccattgtcaaaagcaagtcatatagccaactcagaattaaatttatggtcattatcaatccaccacagagggcaaagcgagagtaggtattcttggggttgcatttggcttcttctttcctccagcattgctcatgaacaccccagagaagggtcatcatccatattcagtcccagccattatgctgcctacctgatctggtcgctggttggatttcctatttgcttggcctccgttcatcatgaatcttctcctgaagctgcgagaagtctcccagggctgcttcttcatcctctgaagagtgcaatgaaggtggtttggtgtgaatgcctctgtcctctttccatgcacctcactgaggcttctttatacagtgctctgggagaaaagtggataccaaatccaaaaacacatgtcatactctgtcaaaaactctctcacgctggtccgttctgacacagcaagaagagaaacctgctaatactttccctttttgacaggcaccgccaaaccatacaatgatttttcccagagagaaagaaccctgtactttccaaagatctgtgacttttccttttctcagttttgtatataaatggggtttggatttgggttttgctagggttgtggttattggtaataggtcagttctgtcttctgttagaaaccgtgcaaggaggtgcctgtgaccatcgcctgaaaaaagcaaggtgatggtcacaggcctctggtccaggtcattgatagcttcctttaaaatatatggtgggtatgggggcagtattgccagaacttttcaacttggatcttagctacaattgaagtacagccagaaaagttgtactcaaatcccaacatagattattttatctayacttatttgcttagttcaacacatggtccattctttaattggaacaggatgactggatcacatttctggtttgatctattccaggcttgattctgctgattatatgttgataaagtctgtgcaggtttattctaggcaaaaagaggttgatttggtcctcatagtcaacattttgtggactttcttcattatgtttggaaaattgaattattacacctataaactttgtagaaatgttgttagcaatttccagttaaaactaattaatggttctccttcatgatgaagtaattgaaaatgatcatgctrtttcccacacaggttgtaatctgaagctacttaaaatgactggtacttcaggctcctgaaaaattgtatcactcttgcatccttgttagtcttctaaagttaagaactattagccttcgttaaaaaacaaagaggaagaaaaggaaaakagaaaggaaaagagaaagaaaaaagatctgccatatactctcttatctataayaataagggttttgattgttgaaaacagcaaaaataaaatgagrtatgaagcatataaggatgagattaaatgggtttaaattatgaaaactttcatattaaatgtctgttaatggagaacaattatataaagcagaacatttcctcaatggcttctgaaattgaaaaaaaatttaattacaaaatatgtttgtgctatgggtcatggggcccaatgcctacrgaggttaaagtcacttaaggaagggattaccagttattagaaatgtaccctttgatataattatgaagaaagataaaatactccaagggaataaaatagctattgagcaaaaaccacccccaagtgatagtcttatcatatgttttcatagggatttgccattatggtatcatgggagtgccaggagtgaaatctattcaaccacactgtcactgcagaactgggatgctattgttggtgatgagtaattgttatgagagctatagcataagctcactgtcgaagacaggcccgtggagagaatattcttttcatacccagccttggtgctgttgcgttcttatttctctaaagagcctgacccaggcctgtacaaaagaaagattgaacactggatctgccttgggtgttcttgtcaggagttctcatagttaaagctgtagactatagggccaatggatctattaagaaatcttagggctgagcttttatactatcagttacattataccatatttctaggtttctcttgsatatggatttagatttatttaggtgattgaaaatcatgatctcttctttaatttgttgctactctttccacaaattatgttggagaatgtgtgtgcacataagcacatacgtatctgtttgtgtgtatggtagatacattatccagtaggtcatttaaccaactaagattttgatggccttaaaatatttcagggcaactaattataataaataatgcagaatatagttttgattttactgttaatctcatacaatctagtagtagcagtagtggcagcartagtggtaatagtaaatttttaaagtatttactatatgacaaatctacttttgagtgccatacatgcattaaatcatttaatactcatgacacttcaaatttgggaggtaccatatacatgtaaggtatctatactaatcttaggaacatgacaatatttatattggartgtaggcctatttaaaaggccagagcaatcataagccaatagaacatgaaaaacaactttttgttttcctaataatataaattggaccctaaatttttcaaattcttggggaatacagtaaaaactaaacaagtcttctatttgttcttttcaattctgactgattccctgttatggcttttgctttgagcttggttcagttcaagttaatcagtgatgtttgtcttaatgttgcactcctacattaattttaatcttctttcagatgcttcatgccaggaactatatgaatggagatctgaatatagatacgctaaatgaaagagcttgaaatggtaccctttttgtctgattgcatggcttgaagcaagagttaagaatagtatctttcttttgtaatratttttaaaaaattggctcaatatcctaagctaccattagaattattgggtgtttttcctagataatttacaatttgaataattttatatttcctatttaaataatttcccttggggtttatatcttgtgtttattttacttcatctcccctctcaaagttgcattactttctcatatgcccctcctcacaaggcaaatattcacacatatttttctctatgtttaaaatctacaatgcaaaataatataattgttcttatcccttttagttatttaataggaatatgcaaaaatgttactgtgtggaaaacatacttggaacattgcaaaacccctgtttcccatactcttctcactgtaaattctttgctgggtcatctcatccatctgcatgattccagctgtcattttcatatgagagaaacacaaatcttgacctttctctgtctcttcttgtgtcttttatattagtgacatcatccctgcctgctgacctaccatcattcacgaaggaactaagaggctagaaacttgacactgactcttaccccatttttccttaagtaaaatgaatactccctaaaactggtggaatgtttctccagtatgcgtctaactcatctcttcctttctcttccaacgatcataattataattctatgttatatccgcacatagactttatcatctcacatttaaactaatatagtaactacctaactgggctttctctttgtcccccttcastgcactcccttgacagagattgctttttagaatgtgaagatttttcttttacttccttggttcaaaatatccagctgtggcccgggcacggtggctcacatctgtaatcccatcactttgtgaggccgaggcaggcggatcacctgaggtcaggagtccaagaccagcctcaacatggagaaaccccgtctctactaaaaatacaaaattagctgggcatggtggtgcatgcctgtaatcccagctactcgggaggctgaggcaggagaattgcttgaacctgggaggcggaggttgccgtgagccgagattgcaccattgcactctagcctgggcaacaagagagaaactccgtctcaaaaaaaaaaaaaaaaaaaaaaaaaaaaaaaaaaatccagctccagctgggtgcaatggcttacacctctaatcccagcactttgggaggacgaggcaagtggatcacttgaggtcaggagttcgagaacagcctagccaacatggcgaaaccccatctctactaaaaataccaaaattagccaggtttggtggtgcgtgcctgtagtcccatatacttgggaggctgaagcacaagaatcgcttgaacctgggagggtgaggttgcagtgagatgagattgtgccacggcagtacagcctgggtgacagagtgaacacctctctcaaaaaaaaaacaaaattccagctgcatgcatatacaacctaacacatgaaccccagattccttccagcttgtcacagttggacctggccagccatctttgcatcatccttcaacagaccttgcacactgtcttcctacccctgtccgcaaacaaaagcattcaagcagtgaccgcatttcaccttgaatccacctcgcacttatttaatctttcctggaccttagattatacttttccctgtgccttgaaggccctttactacatttctatcaaaattatattcatgctcttagatctaccttctctggtctccagcaaaatcgttattcacccctgtgctcccttagggtttgattagttgacacattttctgtgttcacatgcacgttttcaccttacatggtacaacttttaagggactgtttttgcagctgtcaggtgctgagcaatgttttacacagagagtctgagaggtgttcaataaatatttgttaaattgaacaaataatacactgctatttaatgtttgttaaatgtgattataattttctgcaagtaatgtaaacatgtgctttgtacaaacatacatatccacacataattatatatgtatttttgtgtgggtatatatctttgtgatatttatcatttttatcatgggctgatattggaattaaatccaatgcctgtgacttttctaaaatagaaataatagtcactctcttttttttttttttttttttaaataggattccacctcatcacgcaggctggagtgcggtggtgtgaacacggctcactgtagcctcaacctcctgggcccaagcaattttcttgcctcagccccgagagtagctggtactacaggcacatgccaccacaccaggctaatttttgtatattttgtacagactggttttcaccatgttacccaggctggtctcaaactcctgagatcaggcaatctgcccaccttggcctcccaaagtgctgggaccatgcctggcccactatgcctatttaaccctatctttatttctttcttcctttattttttcctttaagttagtgtttactaaattaagttttttatatcctttctggtaagctcactttaataagtttattgtttttggtttagcataactttgggtgactttaacatttctcagactgttatgggaaatgtggattcatttggacatgtactgacatctttcagatcatcacttttgtacattatatatttttaaaaggttgtatctacaatatttatgcctgtgtctatgataactttatttcaaagagatagaagagtttatggaggaatgtttcacatagcaagataaaatggtatgacagtggagcaggaaaattttgtagtaagacaggttaatgttaggagtatagttggaacgtgcatacggtccatgccatggacttctgtgcctttgctaaataaaccacaattttagctccaaatctactaacatctctagacgtgagaaagagggaaactgtgacacagatgcatcatgtccataacataaataacaaatcagttctttagaaaaatgatagtatggccaggtgcggtggctcacgcctggaatcccaggactttgggaggctccaggcaggcagatcacttgaggtcaggagttcaagaccagcctggccaacgtggtgaaaccccatctctactaaaaatacaaaaaagtagcsaggcatggtggcgcacgcctgtaatcccatctactggggagaccaaggcaggagaatctcttgaaactgggaggcagaggttgcagtgaaccaggattatgccactgcactccagcctggactacagagtgagactctgtctcacaaaaaaaaaagaaaaagaaaaaagaaagaaaaaccataatattcccctgaaaccaggggaaaagttctctcccatagttcttgagaacgaggatatagtcaaatagtaaatgctattctctgcatcatatgcatgtttaatttcacaacattatagggcagttgcttgctaaagtccctcaggttaatctgtcgaattataacaaaacacatgtcagtttaatctgttctccagcagatgagagaaaacagtcctggtttctagctctctcatcctttagctaaccaaaatcagtttttatattatatggaggagtggatgaaattgcataacttcagctaattctccataaatattactcctctggccaagttgttttgactgtcattttaagattgagatccctgataagtacagatkaaagcaacactatgtggtcggttaagtgaagcatctcagatgttaccactgatctgtgttaaggctaaataggtacatcttcttatgaaaactaaagaggttggtgatattatgtgcttggataggctagccacctgataaattgaggtggacaaagtgagcacttctacgtttagctagagtttgtataaagtttgttggatttcttcttgaacaggcttaatgggaaattaaggaatgaccaatttataccataaagtatgtctataataattcaaacttgaaaaactattatgaaattataaacaagtatccatgtcattcattcaacttaaagctaaaaggcccttttaaacaccatttgaactttcaatggtgatcaatcagtagaaataatgtactttaataaactgaatgaggtaatgtctctgtagactcagttattgaaaatagtcaaacacttcagaatatttaccaaagagcatgactttgactgtaaaacagttgatctgtatagtccttgccttctgaaaatcactgtgatgaaatcagtgatagttgactctgttctaggaaatgttatacgttttatcaagatacatggttttcctcggaactacctcatgtcctgcaattcataaataattttgttgagaagttttccatttgatctgctttttagaagaataatccagaaaacagcttgtctcatgaacttagggatcctggagtccaggtacccccgattaactctgttacaggttccatttggaatcacgaaaaactgaattatcagaaatgggtccctgtatgtctgaacaaacaatattatctttgtcaaggacaaaatataagtatgaaaacgaataatatccatgatgttgggaaatgaatttgaaaatcaacaaaaattatttctggagagtaaaagagaggtgagagtggagcaatgtgctgtttgttaaatctaccactagctgcattttttcctcacaaccaagataaacatttaaaaactacgattgtgtgtgctagaatatgtttaagtctctgtcatattaagaagcaccaggaaagtgaatatcccagaaagttttgttytgaaaccctggtcatcatgttttaggaaagtgaattaagctttgaagaaggcactttgatacaaaagtgcctcctgacaattaaaaaaaaaaaaaaaaaaaaaaggactgtctttagtatgacccagctgttattgtcaaaggattaagtctgtgagaaatcatgcaacttatgtataagttggtacaaaagcaaccgctgttttaccattgaaagtaatggcgaccaggcatggtggctcatgcctgtaatcccagcactttgggaggccgacaatggtgggtcactgaaggttcgggagttccagatcagcctgtccagcatggtgaaaccctgtctctactaaaaatacaaaaattagctgggcacagtggctggcgcctgtaatcccagctattcgggaggctgaggcaagaggatcactggaacccaggaggtggaggttgcagtgaaccgagatcacgyccctgcacttcagcctggacaacagatgagactctgtctcaaaaaaaaaaaaaaaaaaaaagttattttttttattttcctgcaaggtaattcctgctcatatcaatggcaaaagcaactgctgttttaccattgaaaagtaatggcgaccgggtgcgttggctcatgcctgtaatcccagcactttgggaggccgatacaggcggattactgagggttgggagttcgagatcactcgggaggctgaggcaggcaaattgcttgaacctgggaggtggaagttgcagtgagccaagatggcaccactgccctccagactgggcaaaaagcaggactctgtctcaaaaaaaaaaaaaaaaaaaaagtaatggcaaaaccttacttttgcaccagcctaatgcatgtgatatacccaataggttcccagcaaatggaagtctatgaaccttcaacccccaaaaaccagtactatggtgggctatgatatccatgaaaataaaactaaatttaaaatgttttggccaggcatggtggctcatgcctgtaacctcaacattttgggaggctgaggtgggcaggtcatgaagtcaggggtttgagaccagcctggccaatatggtgaaaccccgtctctactaaaaatagaaaaattagccgggtgttgtggcacgcagctgtagtccagctactcgggaggctgaggcagaagaatcacttgaacccaggaggcagaggttgcagtgagcctagaccatgccattgcactccagcctggacaacagagcaagactctgtctcaaaaagaaaaaaaggaaaagaaaatgtctttttcccactggggaaacattcttgattatattttatcttctgagttaattccggaaaaatgacaacatgtgcccatgtaactataatttgctcacaaaacctgtcgtgtataatatacaaagctgtattgcatagtattttatctttattaacaacaaacacttaaatagcattggttatattagggatcagtggctgaaatacacattcttccttcctttagtgaatgcacatacattatttattcagcagcctcatagccatcatcactgagcaattgaaggggcattaatcttgtggtaaacatcaaaaccatccactcgtggctgttgggggattggtggattatgtcatgttgctatgccagtgaattcaaggctgagaaaactttttttgttgtcaatttgctgtcactttgttaagaattagagattgtatgtttcccaaatttataacaatgtgtcagtctattacaactaaacgaaaatgagcagctctgggttgttttcaatatgtaagaaaaaggttttattacatcgcttctgagtatcatcttatcattggaaacttatatctatttaattggcatgttgtatattaaaatgtgacagccgtgagttatctataaggagattcttaatttcatgtcttcataggaacacaactcaaattattcttcctcttattcaggagaccattggctgtcatactctaatattttgtgaattccttttctggctagggagaaactacccttgcatgctcaactgtcttcaaattgcaggaattgagctattagtggagaaaactgatgcaaatccatgggtatttacaacccattctagactggctcccagggaacttctggtgcgtctgtagtgaggatgctgagctcacgtgtgtaggctgaagcagacatttcttgccttcatcctgagacaaagcagataaggaggcaaacggcttgctctacgagccccttttgccaattcctgaaggaaaagctggatcagtgttcaactgacagacacttgctttgtacttagtgctgtgctccatccaggggcagctctattggtgagagtccttcatagaggcatactgtttcatgagtgcctcaaatacatgacawtgcttcccaagggaagacatgactgaaaacatatgcaaacaatcataacatttcagaaagccatccctgataattctccttcattcctcatcttcaaaatattaccaacccttgtaaaattgacattcaaattattctgaactttttccacttctccctatctccttacatcttcctaatgtaagtttatcttgccacagggctatctcggtactatcctaaataacatgcctacatcactttattcttattttttgcttttccccaatgcatttttcataatgcagttaaaaagccattttttaatgccaattttgtgataagcgacatacactcccagtacacatgcccgcaagcaccgaagtgcccacacacttgtatttaccttcaaaacccttctttcctttcatttgcttttggaaaaagatcgcaatcctttatgtatgccctcaggttttgcctgaaaccctttttctaatttgctgtgtttaatctattgaagaagaaggtcaaggttttagaatttatgtggatgcttgacaactcttcyatctagttgcaaaagataagggatttcattcatgtaacttttggtagtggttttggccattgtttggcagttttactttgattgggttattttccagatgtctgaactcctgttgaatagcttcttaatatttttgatatttgaaagcatagtgaataaatttctatcctgtgtttgcttttatatatgatattcttttgatagagaggaaagttcaaacatttcgaaaagaaataaatcatagttgtaaacttctttgggcagtttcataaattgatagtcctgtgatttcaaagattttgaagaaaaacatacattgayatacacacacacaaacacaaacaaacacaaaggctgggcgcagtgacgcatgctggtaatcccagcactggaaggccagggtggaaggattacttgaacccaggaggagtttgagagcagccctgggaacatagcaaaaacccatctccacaaaaagaataaaagaaaagacgggtatggtggtatgtgcttgtggtcctagctgctccagagtggaggcaggagtgtcacttgaactcaggagtttcagactagcctgggcaacttagtgagacccatctctatgaaaaataaaaataattgagccaggtattgtgacacatgcctgtagtcccagctaccctggaggctgaggtggaaggatcccttcagcctgggaggttgatgctgcagtgaactatgattgcaccattgcagtccagcctgggtgacagagcaagaccctatctataaaaagcaaaacaaaaaacctagttccatttggttattctctggtgttaaattcaggctgaattttgccatataaatagaaaactatttgcatttatgggaaatgtttccccatagatctgtaatacattctgagacatataagttatctttaactgcttattcatgtactcctgtagttttcattttttcagtgaaacattttatatgtgatgtttgatgttttaagattttgatcttttcatctttcaagacaccctctaaagaaaactgccattacctctgttttcagaatcaattttctcctgtcagataaaacaaatacctaccacagtttgcctttaaaactataaaaactgttactgaatgtggtaaaatagtgaaatgctctttttagaaaaattatttagacatatctgagtcactttattttgttcctcttgctcccattgccttacattattaaagactagagggtaacaaccattttctgtaatgtgttcttgtttcaggaagagagaactgtgatgagctgaggggaaggtggattgtttctaaaatttttgaaagtttggcttaaaaaaataacatttggatttctgaagctattctaagttaattatgttttaattggaaggaagatcctcaaaaagtttgtcttctatcttaaatttttatcagactttatcatttctctaaataaaaataataaacgtgcattatgttattagaatattgatttctcacattttcttttcatgagcttgcaccttgctcttgagttatcactcaattttgttcattgtttgtaattaaatacttatgccttaattttataggaattcatgtatttttagagttaacttttttcagatattgtcatcatttgtgtgaaattggtaataacagttggagtgtcatttaaatagtcatggtattcaagagggcctcaaataaagtatatatttaagaatgtttgtcacaattgggaaagcaatgcttgagtatatctagctacccagatgctttgggaataagtctatatatttctgatratatgaattaattataacagtttacttctatataatttaaaattttgaaatgatcccaatcttatagaaaagtagaaactacagtacaaagaacttattattcctgaactgttagagagttaattgccgacatgatgccttgcctgtcattcccaaatactcagatttatacaaacaaggcattctcctacctaactacaatgggactatcgaaatcaggaagtaaacactgatgcatcataaccatctaattcttagatccgcattcacttttgatcacatttttccagttgttcttacttgtgtttcaccagttatcgccattcaagtttttataattttccacagaggctccagttcagaattgtattttgtacttgtcaacctggaagagttcctcagtctttctttgacatttctgaccatgatagttttgaagataacgagcctgttatttaacaaaatgttcttgtttggggttttgctgatgtttactggtggtcatatttaggttgtgactcttttccaggaatattgtggaagtgatgttatatttttctcagcacaagaatttgaattatccctttactggtgttattaactttgattttttaatcaaggttgtttctgtaagccttctccaatgtaaagttactaatttttctttacatattttattattattttaaaaatagttaaaatttttaaaatttaaaacttcaaaattatttgtctttaatggtatttttaggactactaccrtgcttagaatacagcaaaatcatgtaaatgggagcattattttctaaattaatatcattggcatcagcagcagcataaggagcatcatttttggtttctaattgcatactgcaaatctaggagatgcttaagactttccctatcatttaatctctcacagactgctttctttatatttaataaatttatgtagggagtccctttgatactatgtaaagatactatttctcctgaaacttttaatttactcagttatttatatcagtatggatgcatgtctttattttattcagtgtgttataacttgttaatactgtcttttttaattttcgtgttcaagttgtccaatatttggtcaataagagcccctttaagctggcttctgtgtacatttagtatatacctttcattctttgagtattttcttatacaacaggataagttgtgtcttctttgcttgttctcattccttgcttgttccagtctcattctttgcttgttccagtcctaaytggaatcagtgatttctctaaggagttttctgaagggaagctttctgaaaggaaagtgtttcctttcaactggagaatggtatttagaaaccaagatctgaatacaaggtgtgaccattgctactgggtattactgctcccagcctctcttggttcagctagggaagatgtctttgctaagtttatataaagaatgtatgtttgtgcatgcatactcatttacaagtcatatatatatgtatacatatatatttaaaatatgtatagtatatgtatacaaatgtatatatatatgtgtgtayatatatatttaaaactaggtgttcacaccaacactattagttccaatccaacactacacaattgattctgattttcttttttttataacatttgatggcttagaaaatttattcatatatacttatatttaccaaaatatggtgaagaaaccacattgaatgttttctgtagtcccatttgattgagcttgttggtttgtaactttttacaaagctaacaaataatggatgcaggatccaaatccaagtctctttccttgtttactatttttgtctttgtgcctctttttctaaaaaacaagaataaaaaattattttctaaaaataataaaattcattttatgatttaaatatacatttcggtaaagtggttaattatttgaatattcaaagtaaggtaaacatttggatggatgtaaagggtgagtataatgacacctgcttgttgataaatataaattgatagggaataatgagatttgtgaaagtggatggatattggattttatctaaatgaatcccaaagaagggaataaatgtgtttccctgatgcctaagtatttagttaaacgttcaggtattaatagtgttactaggtaggaggagaaggtacttcttttttttctcaatgmgtttatttgattatgaatcacaaaaagggtaatcatttgctcaggccgagcactaataacagtatgccttaacttaatgcaatgtaaacttggagctaccacatttagacaaatgataattaaatctaactggggtttatgttctgctatgtagacattactttgtaatttgtaggatgattgcatgcattgcttctaaacagtttgttttattctctgccmggagtaccttgcaaactcctcaaaatgtgaggaatatttcataaaatggagctttgctctggaatgctctgtgggtagctggttggtatgctgaatatttagtagctgctaatgaggctcttagcttaacaatgtccaattttctattcctgcatggcataattctatgagaaatctttcgagactcttgtatccagtgactgcctttaagagatacctaaatctactctgaaataaaagcttagctgattgatttatagccatattaagacaagcatactatctgtatgtaataacttgcaaagaggaccttgggaaaaaaatttttgtatcttgttcataattacttttttgggaacagatcttatatttatcgtatgttccatttggaatgtcatgtattaactgtcagtttttttttctgctttatatagtttcttgctgactggactagcatttgatttgtaattagaaactatatgattttttcaattttattcatatgcgtaacatttcgataatggcccaagagcccaactttgctagaaaacggtgatttagcttttatttctttgctctttatttttctgttttcagtcccttattcaattcacttacaggaaaattgactttgaataataatggtcatgatgtcaacacagtacaaattataccctgctgccatctggaatggtgaaaataaaagctttatttacactgtttcctttaagaaaagaatgttttttcctcttcttcaaggactgtattctggaaagaaaatggtggtccttgtttgtagcctgatactgtgattcattttgaaatgtaatgacttgaaaactcattgttcgacaaagtagcaaatacactatgataatcctctgccttccagcctctgagacactgatctgtctccctgtccagataaagctttggagtagtcattattagtcccataaaccgaagagggaccttgtggcccaaagtcatagggtagatatgttaggtctacttatatctgcttttctggtctctgtactgacttttggtgcctgctcatggcagaaggcccgccattctcagcccttcctaggtaattaagtagaaattacagaagggctaaaggtataggcacagtactaaatctcagctctctaggaaaattacttgacatttatcagccttttcacactcttccatttctcatctaccttgtactggctaacagacatggcagaattctgtctcttctagaaccaatcctgagggaatgagaagcctataacatatgtatatacacacacacatatatacatttatatacgtatatatgtgtgtgtatatgtgtgtgtgtatgtatgtatatatatgtggatttttaaaatgtagatctatttttaaagtattattacatctcatggaacttgcgtatctagtccatgccatttaaaaaataaaagtaaaggrtgaccaagtattcaaactcttttgttgtcccattcatgagttgactgtgattaagagtttcatcactacatgatgaagatttatttgaagaatagcaatttgcatagaggaaacatgacacaataaaaagacaccaaatctagagctgaaagactttctttaattttttactacatgtaggatatgaaacaaataacaatattactgagtttttgttttatagccacaaaaaaatgataatgataccatccttatttacctsaaggaactctaataaggttcaaatatttgtattttagagatactgggcattatagtgctttgcattaggtaaaattttaaatttgtctaatatgatcttctgactaaattccattctgttaaaggtgggatttagtaagagcatcatattagacaaatctcatcgagagatttcccctctccagagctgaacaattaatggagctattagaactagtttatggagactttgtacagaggtgtttcttgatttatatcattttccccaaacagttattttcagaatgttaagaaacttttgagatgaaaaaacaaaactctgacttcttggcatcatctttttaaaaactattttctttaagaaagccatatagccttcttaacatgacctactccccaagatgaggaatacttaatgccccttccctgaataactaaaagaaaaatgcctgccatgatatagggaaaaacagttggttccagtgttttcagttgttcacaacaacctttgacatcccaaatatttagagctatttttaaaattcatttttaggaacaaatcatctgacaatatggattttatttatttgtactgttgattaatcaaagagcctaaaatcttgttcaaagggaaaagagggtatttattrgctttgcagaggttacttggcacaaacactatgctttaaatttagttgcgtgtctagataacccctgttttttatgatttgcatagaataatttctcatttgcagtttattgctgcactacttgtttgatcaagccttagagtcacatgcctctgatccctttagatctattgatggagcttggaataaagcaagtacatatatgctagtattttactagatgccagacactagtgccaggcagcactaggcacatttaatgcatcatctaattcaatcttcctgtgtatgtgcttggtactattattactttcaaagaagctaattatcctgcagatacaattaaatcacaacaatatagagattatctagattacttcatacccagtgcctggcccagtccagcacaaaggaggccttcaataaatatttgtagaatgaatgatgccatctgttgactatccggtaggtttttagaactaatagttcaaattatcttcttgtttcaatatatggtgtaattttcataaatatcttgttttaaagtatctatttggccaccttatttgaccaccttaagaccaatgtgtatttaaattttccgagaaagttcgtactttttcttaagtataaaaatccactgactttctgctgcatagaacactactgattctctgacacgtgaaaaagtccatatatgtattatatatattaaaatgacagtcctagtgtgtgtgtgtgtgtgtatatatatatactctaggaatgtcattttaaaaatacgctgcatattactcgtctatcatttttcttgttttcttatgttaatgaaaacttttctcactcagtctttccacccgtcaaagaaaagaaatcactcttgttctgtgagagtatatgaatgactcaaaccgtaagatatccagtgacttagaaatctgtattcctgtcagtgaaggaagacccacagtgtttgcctcaacaaaaaaactgagtggtycactcctgggcttttttagccattagtttcaacaccaagaattccattgttattctatagatagaataacagtagaatatagatacgtgttctattgtgttctttgcagtgtcattgtgtttatacatgtggttttgtcatgtggtcatgcttctgacacgtaggaactgaaaaccaatatatgagggaaagcctcctgtaaaatgaaggaagcaaggactaaattgtgtgcttctcacatagcaacygtgataaattaaaagcataaattgcatattctcaatggaaggaaaatcacttgctgacgaaactaaagattgtgaaaataaagtcacaaacagccattttttaagtctctaattctaatactccttatgacactaaaataatgagactatgagatagctttgcctcttaatagactgatactcaaggaggccaaatgtgtagtcacaaacagttgaagaatgactgtttcagtgagtggcattgaggaatggtatttcaatgaatgacattccaggaggaattgagagatacctcatgagtgagtgctgaaaaagtaattgtcaaagcatcataaaaatgtctaattgtgagtatttgttgaacattgggaaggttacgaagaaagtaacaaatagctcctgccctcctgtgagcttgtaagagttcacacttacatacyaactattattacggtttattgataacactatttggggacttttaaagaggagccactctgaactgtttgaaacttagaaaagtaattccaggggatgaatgcttcatgataacagctgcttgtctcttcatccatattgtgtttttgttttattgtactgccattactgccaaaacctctgtattgtcaataatatctaagtgttcaggtatacttgccaaatttttaaatactgcacttgaagaagcattgatgtaattgatgtaattgacacgctttttcttyataaacatatttgtattaatcttaaaaattgggatttttcccaataccatggcaaacagttctttattgaagacttcgttaaatcagttggggtcagagtcaaaggactagtctggttgaattcacgcagcaagagccctagcaagattaggcaagaagagctacttaggaccaccttggaaggagcctgtagccttagcaggcaattcagattttcctggcttccttacaaagaagagattcagtgtttgtgaaagtggagtgaaagtaagagcatcgttaatattgtttatgcatgaacartgaaaacagtttaastgaacaaatcatgtaaaacctgttacttgatcattcacagatatgtaaggcatgactacctacaaaacagtgtcagactattttcctcatggattcattcctttcaagtcctgggtaggtcagggttgttaataagttctaccacaatgggaagttaactctggaagatgcttacattcatttttctctttccttaatggaactgaaagttttgtatcagcatatttcattaagataccaacagattcaaagagggtgctatatttccaggtctattatagctgccattccaaacaaaatatgtatgactctatgattcactaagcacaagtatgtagtaatctgccctttaatggcctctcaaaatgacagaacaaatggctttgtgaaggtcaagtctgatttaaatggttgatgaattagtagctaattctgcatgattgaatattaatatggaacagtgataagtaaggcactttaaagcttaatgagcacattaatgaataggacaaaatgtttttcttttcacctcatgtaaaagtttaaagctactagcatattgacaatttgttaatttttgctagctgctttttcctgtgaaagtttgtgtggttaagttattaaggatattgatttgattcccaagttcctggtaccacacatttgaggagccgtcaaaattgatgttatcaaatggccaaggcagttttatataaatcactaataaatgtggaaggtgaagaaaaaagcaattaacgtcttctaaactacacccacggagataagcattccaattagaaatttcattatttctacagtttgttttatgttgaatactgagttttattgccaaatacctgacagtcaaattggaaacaagccacaactgtcaacgtgtaacagctctggctatttgaatctgttacattgtgatgtttctcatgaaaatttaacgaagaaagtgcattcaaagagattstgtgcaaagggggatggatagaatttaattacccttattaaaaataagaaaggaacgctctttacattttctgtcccattagtatgcaagaaagattatctttgttgtgcactcgtgtatatgaaaagggggctctggagtgttctttatgagccaggaaggaaragaaaggtcatgaaaatgtattagactgcttttcaggaaggtacaagtcarttttgtcggctatccccaaggtgaggactatatttcttayraacggttattaaatctagatttctttggtaagagcctttagtaagtggcttaacaatcttaagcctttggcacttgccactgatcagcactgaatattggctcagttcttccgagagatgaacttgtagaagaaaagtaatgactagcagagcagtatttatgcaggcaaatgtaactagtacttaaacaccatgggagagatacagtgtcctaggacatacagaaaccactcaggaatcgcaaggtgatttttgattaacctaagttggttgctttaaaaatggaacataacaacaacaaaatctaagagctttttcagaaactcatttttatgaaggcggtatagttggtgttggagcacttgaggtaaattacttttatcctttgaagcactttgtgtcaatagctgccaagtgagatatttaataacataacgtgtgtggtatagcagctattgatctttctgctcctttttccccccagcaacatcagaactatgttgtagatgtaaatatattggcaaaacctttaaagccataaagaacagcctgatgaaattcatgtggaatagattattaaaaccagcatagcctaatttgcatcccacttttaatttttaactttctcttggagccttgaaaaatcatcttgaaattcaatttttaactactgtttctgacacttgtctactgtagacctctgcttggctgacgatgtgtaaacattcacaaaaacaatgtattactgcttccacaaatgagccacatctttcaacttaagtgaagttcagctcattgcagttaattatttttataagtgtgtttagtacccggccctaactacctggtctgataggaaggtattatgtcatgaatcaggtgtcaaatcaaacttgcctcagcttcttttggtccttcacagactgtgttagtaaaagatagaaactttctatcctgcccagcgggagagccagagtctacgcttttccttaatagtccatcaattttatcttacaataactgcatctgttcagtgaaatttctctttcttgggagctttaatctttggtagcatcttacattctttcgccattcacattcagaatctctctggtccctaactatttaactggttgcctctctaccagaagttctgcatagtaggatatatatattttttaaacagtcactgatatatattcatacttaggcttaggaatcagtggagtttctcttaaaatctggaaacccaggctagcatgattgcaagggagcagaatacagataaaacatggaagaactcctggtgtggagggataaactcatgagttaataagtacaagacagtggatttgagtagccgctgctatggtagctctgaggaggaaagaatgaaatatgtttgagagaatttggaaaagatttacaaagaaggtgactttggctgcgtggcttcctagaagcacggagtacccagcaaacatgatttgtctgggaagtggtgagaatttcaatgtgggcagaagaaaaatttcctatgagagagttgatccctaagaggctgagaaaaatgagacctgattgaaaaggactttgctagtgaggtttaggagactgagtttacccctcggctctagagggagagagttggagaacacatgctgttgactggcaacacggtggaggcatcaaaatggagcttcttcattagaaattctaacataacctcagtatgattcaccatcaactgtgaattcatggattatactggagcttgtaggaggcacccaaggagaagcgatatgccagatctgatgatatctaatgttctgctcgctgctgtttatgctttcgagtaattttagaattggtggcttatgaaaatttatcagtggccgtgagggggtattgattaaatcaatgccagactcaattggaagtaaaaatatttcatgatcacgagttaatgggtacagcaaatcaacatggcacatgtgtacatatgtaacaaacctgcacgttgtgcatatgtaccctagaacttaaagtataataacaaaaattcatgatcttcaaacaaatggccatgttctaatttggataattgccacccatctaactaaaattctttcgatgcttagatagaacacacctttctaatcctggctagaagagctggcaatgtcagttatcagtgtggagcatgattgtgggatttaagtgattttaatttctcaagagctgggatctggaacagtttcgatgtgggtagcaaaaagtgaattttgcatgagttggagattcaaaatttaggaatttcaactttttaattactgaaaatgatgcagatctttgggatggaggaaagcattctcttatccctgtaaggaacatgtgtttttgtgccattaataaggagttgcttttgctcttctttttcaaagcatcctcagacaattttctggttaattgaagctcttacaaagtaatcgatttgggttgaaccttatacttgtgagggaaaacagagttataagaaaaacataccagctttgaaacagatagcgtgacctagcttctgcttgttccccaagtactctccaagctggcactgttggcttccatgcttctctctcggcaaaacctttcctacctcaatgcctacacttgtgacattcccgaatctttctaaaatctccttctcccctttttgtgacttggccgattgtgttctttcctaaatgcctactttaaatcagagcttcctctgggtactcactgatctcaagcacaaaccctataattatttctccctctttgctcttggaaaactcactgcatcccctcatcatagtcggccccgtctgagctctgtgttagtctgttggcctcttacatagagtgtttactcttctgatcagtagcagcattgtgactgtgttctaatttattagtgcctggtttgtgttaggttctcaacaagcactgagtaaggtaaagagagatttctggggaatctcttgaatttggagcatctgacttattaactgaatgtttctatcaccttttgtcttgcagaagatcaaattcccaggggcttccctaccattgacatgggcccacagttgaaggtggttgagcgtactcgcacggccaccatgctttgtgcagccagtggtaatccggatccagaaatcacttggtttaaagatttcttacctgtggacacaagcaacaacaatggtcgtattaagcagttacgatcaggtagggtcttgttactgtttctactaactcctagagaatttttttttttaatttttctctctccttatttttaattttaatttattttttatttctaggtactgatttttctccctcttctctttctctgttacttaatgggtggtccatgtttgtgatgtcatagcctgtttcagagtctgtctttctccttttctctgtgtgttttgcagcttctgtttaatccacattgctcactgctgtgactgtatttttggtaattttttaatttactgctttttcgcagtatttgatggatccattttctcctctttctttcttctttctctgttttcttttgaaacaaatttatttcaacattggacttcattcagaacttgcaaggagatccaatggttgtatccattaaaaaataaaatgttcatattaaaccctaaaatgtttcaattttattaaagtatgttttctgctatcttttctacatttgaactcatcaaagtaccaaagtttagtaagtctgggcacatctgctttcttttcactaatacataaaaacacagaaacgttatctcatgagtaaccagatgtatgtttttaaaagtctttagaaaataccagtaaaaggaggggatttttattaatactatgataataacattgtgagtgaacattttctacacattagccacagtagtgtgcgcccgtcaaggtttttgaaccctccagtgactggatctacagaagtctgcttttggtgtagactccagcttttgctgttttctctctctctttacccttttctccttttcccattcccatcccaagtttatgcctttgctctcttagattaaaagtagagataattctaaatttcttaagttttagagcctgtccctaggtaatttcacagggatatataataataagctgtttactttgacattggtagtaatattggtatagaattctaagttgtttaactgcctgtcttcccagaattctcagcttttgacctgtcctgtgatgttaaagcgtcttgttaactgcctcttttgcttgttgtcagcagaattgtgtagattagcattctgttattgtaaatgaagaattaattattcacatgtaacatagatgatttagtatataaagctttaactctgaaaaatttgtaccaaattataaggaatataataatatttttatgctgtctttcttctctccgtatttaaatctccagaatctattggtaagtgcttagttctgaagcgcacttcaaccccactaatttccatatccagaatattattattattattaataaaatgcatggcatgcattttactaactgtcagtgtagacaccagatctctgtagtggctcccacacacacctccacagaactgttatcgtaagaacactgtgcagaaaaattaaatagtacacaagttatggcacaccaatgtagcatagcaagtagtataagatatccaatcaacaatgtttgtttccagttagtctttagygtttcctatcacagtatatatatatatgcatatctatatatatacttaaatagattagccagtattttcctaaactatgtctttaaaaatattgtatagtttttttttaagagatatgaggcatataagatataattctaaccctatatgaccccagacctgaaaactcagttgcttctctgagaaaggcaatgctgcctattgcggtctttaccctctgtggtataatgcaacttgttttttatgatctaataatactatctaatatattcctgttttaccaatatagtaattcaagtttcttttaagaccttatttaattctgtaaatctaatttaattcttctccccagccctagcctccttcttctcgtactaatgcttcttctttctaatcttatttgcattcatattatccacccaggtggtacaccaataagaggtaagagtgctgaactaacgttcacagaatgatcttactcattctttctgtcctttcatccctctcatctttgtcctgttttcagcgtcattccaataatgtccatcaactttttttttttctttgtactgtttggttatgatcagtgactctcatattgtgaactttcctttcctttttctttctctctttgttttgttcatttctttctttatgaaaatgattatttaagttgtgatatgcttcaaagaaagcatatccaggtctttagaccacagaccagtcacagcgtaccatctgtccctctttttttttccttttcttcttcttcctttttcctttttctttttttttttcttctttttcctttttttttgtccaaccggagaaaaaaaaagatcattttttttcttccttagctgttcttgttctggaccaaagccaaggtggtctggagaacagtggcagacatgcagaagacaccctggagcatctgctttttgtctttatctttcaaaaggtttttgcttttgttcttcaattcttttttctcttaatgtcttaaaagtcaaagaatgactcccctttccacctgatcccactcgtctacaatctgacagcaatgcttttttccccacttctttttttcttggattactcgtctccggatttttggatcttctgtccttcaggctatggaaacaaaaggtgctcagtattcttggtggtatgtggtattgctggtttttcatacttcgactcagtgtgcatttcttttgtaattcttgttttgtatttttcttggggttttgtgacaccacactgctaatcccactggtggattttgatgggtgtcttaggggatccatctcagggtcctcaagcagtggttggttggctcttccttgtggcacaggccatgccttttaactttttaaaaatcttctaattcaactgctctttgtttttcagcaaacgtaataaatgattgtaagtcgtggaaaactgtctttcttttcttaaaaatctgcatgtcttaagggagttttgtttctttaagtgatattttgataatttataatgactaattttaattttttgctttgtgcagcctttttgtgctcgctgcgtatttttggctctcttcagcagaagactttcttgaaaacccagcctggttttttttgagcgtacctatcttttgcgccacttttggtacccaaatgaaacaaaacaaaaccaaaaattaatcttttgttttatttaaaagccatacttccttgaagcagtctcacccatcttcattttattagtctaggaaataagagtgttaattatgactagaagtcttgcttgggaaaagagatattgatttctaatgctagcattgatgatgtaaaaaaaaaaaataatctctatatgtttttctcatcgcatcattttctgtctgtgcaacttagcaagagattgaatcgacgttgagtggaccttcgctttgcagggcttttcatattgttaagaggtttagctttctgaactgagaaagccttctctgatcatctctttggcaatatattttatatccatacaggagcccttcagattgagcagagtgaagagtctgaccaaggaaaatatgagtgtgttgccaccaacagcgcgggcactcgctattccgctcctgccaatttatatgtcagaggtaggaatgacataaccctggcatcgcttcttcattcaggctcagggggagttgagacgccgcagggtccrtgttgttatattagtagttaacaagctggtttggtaatagtgaccgtagctgaaacatgttagtaaatagaaaagttaaaaatttaaaatgtgttgtttaactccaaaagacaactcttgagtataatctgtcctgaggcttggagtttgtaagtatatttgcatttttacatcttggtttctatttttactgtattgattgaactgtgctttgcatttgtttgaggttttcttctttttctttctctttttttctgttgtttctcttctgtttccttattaaacccctgaaataattgcttggtgtgctactaatcagttctctgtgcaattccaagcataaaggtgtttatgtcttcatgacccctgctgctgaaactgtaaggataaagctgctaactctataaaacaagtgctacatgcaaatagcacagttgcatttctgtcttcgtatactttcttaattataaacacatagtattatatatacatgtgtattcatatatgtgcacatatgtacacctttttgtttgaattattaagacttaccgaaacatttagttttttgattgcaatggaaaactgtattttaaatagtaatgtgagttgtccttgagacaagaatgaattatgaggatacattcatatgttctcatgaagtaatagaaatgattaaactgtgagcttatgaatggctatgcctttccattcaactagaaagaagtacttcctcttcccgagagttctcaaagccagttcctgtagttttttttatccagtggaagtgttcttattcctggtctacatatctgtgaataaccacaaaggcatgggtgggggtgggattaaagaaaagactgagagggctttaagttacaataggatgggttcccttaagaaaatacctagcttgattttgaaatttttgttagaggtaattttgtttccctggggatgtttttctctcctttctttttttatggagtctggggtggggaaatatgaagaaagtcatttcttctctaaattcttcgaaagtcccttgatcctttttccacaatagtgacctcccttgctgcatgaggcatgtgtaccttcttccatggaaaatttcaaaatgatgctagctattgtttctaataccatgttagtctgtgagatattgctaacttttccagctgagataggaaggatgaactagagcgaataaagatgttcaagtagcagttgaaagccttgatatggcctttttactctctctgtgtttcccttgtttttctcctttcctcatttcattgtgttctgcatcaaaccccctacatccctcagagctgcgagaaggttggtgtgttttttactttttacccaccttacaaaactattaattaaaccaataacaaagaatacaaatgaaatgaatgtagctgcattgtgttcttcttttggttaatggtatgttttagcagagaatgccctggccatggcttctggtgcttgctggtggtatctaactgtggtgcatggtgggagagaatgtacctgggtgcatggtaactggtaacacttaactctgtaaggtccagtgaacttggtcagtgttcctgctttccttcctgctccactgtccccatctcccaccctgcctttaatttctgtcttataaggatgcctgctgcccatagaatgactttttctagtttctcccctaatcccaagcatgaagactaaactctcctccatttttcttgatatgttctttgatacctcagagtctacactggctcctgcttgctttgtgtaacctctgtgaattggctgcaggaggcatgcttagctttctcttcttctcctatgactgtcattcacccatgaggccattgcagtgagccatctcaaataagcggaggtttatctcgaccttaagagcagccaaaaagttttcagacagaattacttatcttcttcttggggttatgaggttacttatcagtttatttataatttttaaaaaatctttattaaatgtatttaaggtgtgctccctaaagattaccctctagatctcaaattcttatggtatgacattttgccagtaaaagccccagatgaaaccaatttatctttcactttctccttgtatcacatccaaaacacatttacttaaacacacataaacctgcagattatctgaagcaggaacactgaactgaaattgcttggtaatttttctgtgttatgttgctttaatatgatctcttctcttaatgtcatgtcctgctgtatgttttagatccagtgtccctcaatttgaatgtgggcataaaaagccttttaaaagattttgttgtcatttatgttgttttacctttgrtatgaattgaatggaatcctgtatgtgaaacacccagctccctttctgaatttgcaatccttacctttaacaacttgagcttaatcttctgtctttcaaccctgtcatcccctaagtccctgtgtttcaatcgttatactttacctccccctttcacgtttatttctattgcccccttatttcttctgcggtcattgctgtcttggattccagccattctttcaatatccttagcacgggccttgagattccatcttgtgcatgccttgcatgacccaatccagtatctctactggtgttagcctgtttcttcttctgtgactgtaaatcaatatgtatatacatttctgtgtttgttccagtgttagtgtgaggtcttgaggctgcatccactatgaatctgaaaacataaagtgcactttcagtgtactctaggtgatgttttccagggctgggatgtgacagtgtggtcccacacctacattcacatcaactggaagtgcacagcactgaagttggttttgatactcaacttaaacatgctggtgaccttccagcccccttttctgcatatacatgcctgcatagaatcattgttatatgcctgcatgtatatgtttttgtgtttatcttatgcatgatgtttgtgtattgttagtttgtagatagttttttgtggggcccttgtaggtctgaatcaacttttgtattagtgtgtctaagatatcaatgactaaactaaataaataattctgtgtatacacacaccatacttgtayggtctgtattatccacagtttttctttatgttttgtttttggacaatccacaatgtttcaattgttgaatcgtgtctgtacggtgcatgtcatgtgtttaataatccactttttcttgccttgtatatgttatcatttcccttgtgttttgttccagttcgccgtgtcccaccaagattctctatcccacccactaatcatgaaatcatgccaggcggaagcgttaatatcacctgtgtggccgtggggtcaccaatgccttatgtaaagtggatgttgggggcagaagatctgacacctgaagatgatatgccaataggaagaaatgtgctagaactgaatgatgtaagacagtcagcaaattacacctgtgttgctatgtcaacactgggtgtcattgaagcaatagcacagatcactgtcaaaggtatgctcaatggattatgctttgaggatctgngtacactcaagccaagtgactaatgcctctagaaagcccatccttgaaaatctaaaataattcattattcagcattttaaatgtgtgtataacctaatcatatctgtggtattatataacatkcataagcctagataggcggattttttcttggaagtatctggcagcctatgtagagataatcatcagaatattaaaagacagtccatggaggcccaggcactaaccagacagaactaggaattttasacatggtcgaccattatggtgggactgatgtgtacagtctacatactagaccagaaccttgataagaaccccaagaaaagtcaatatgagcattaataaatgcttaaaatttctaaatacaaaggaaaaagaagaaaaaaaaagttgaaatcaacatagtctartaatagatgatttaactttttggtgagccctactattaaaaatcaaaaggcaagtaagagtatattctgttgtagttttatctttcaccttgcatagatgagtgctcaaggaatattctttcctttaaaaaacagactaaatataaccaaagtactatattacatgaatatttttgaactaaagagaaagagtacaagcatgtaagggtaccgtttttttttcccctagtgtttatagaattctagaaagtgtttgcaaattgagtcagacatagggcaacttaagttttctgcagatggctagaactattgcaaaatgaacacaaattatcttcttttcctaggcaatgttgtaggcatttggaattcagcagcaagtaagaagtacaagtttgctactcttgaaaagctgccattctagggggtgatcttagaaaatgcaatacacgttataattggtatcgyatctctaaccaagcgtatatatcaaatatatgctatataaaactaatgacatgagaacaaaggtacacattgtcaacayttacaatcgtgaaataatgttatattgtgtaaccttaatataataagcacacatgtatttatccgtacattacagacataaaacctgtactgtacaataaatgtgacttagtgaaactaataatgtcagctaaatatcagtgagcacagctttaattagcaatatttgtatttgctttgaaagttcagaaagacatgtaggggaaatctggagcacacacagccttgaaaaatgccaggtcagaatatttaaacaaatttcattttattattattttcagtaaattcccttgacaaaatactatcattctgtagttctttgagtagtgtgtaaatattgaatcaccttttttataattaccatttcagctttaaatatttgaaggcttgctgaagacctttaagaattcaaaagcaggggccactttaaactaatattttgttcaccttctcatctttgttttcctgactcttgccacttccctgtcttttccacctcaaaaataaacaaataaaacataagagtgaatcttaatggcaaattaaaataaatcaaaacaaaagaacaggttgaagagaatgaggtgaatgggtgctgactcatttattcagttaactgtttaacgattctcattaaaaacctaccgagtgccaggcagcattctaggcattcacaattttacagtaagtcagaagtacaagtttgctgctcttgaaaagctgccattctagggggtgttatacttcttgcctttatgttggcaaggaaacagggacrctaatgggctgattatatgaatgttaccctttgagatttctctaaagagtcaactattagaatgccccttcctaccctaatagcactgcgtttcagaatcattgtttagaataaggcacttgaatatgaggtcagcaaagcagacagtttatatttttaattagtagtattttgatttgtattcttctgctaaaaagaaagaattagacctctaaaaagatggattttattgcaaatatttgtcatgtagctacattggmtatttctgatgtggaatatagaatgcatattaatatgaccataacataccttaaaaagtgattggtgaatgtgccttaatttacttccttcagcaatttttaaatattaagaataaagcattgatttgaaatttctattcttttgcaccttaaaatttttggtttttcatttacaagaaaatttttagtaatggtattgtgtcttaccagaatatagatgttattgtttcatcgcaatttaatttcatttcaatgtattccacattttgttcttttcaatgtttatcggtatttcagttataccatttatttattggggcaaggggctaattggccaagcttttggtataataatagtaataactgcagctaatactaaggwttttttgtgggttccagttacattctaagaatcttagtggattggctcattagtcttcacagcaaacccatgaaatacagttayatacagctgtataatatgacttaaataataatatttttcccatttccacatgaggaaactaaagcaaagagaggttaagaaatgcgtgcaggatcacttagctaataagtagaggatttggatacaagcctaaaaatatgctatcaagcccttctaggaaagcaggatttgtgtcacctatgaatgttttcctgtccttcttggccattcagaaaactactctttgctataatttcatttaattaaatcttcagtagatacataatcctgtcattttcatagtagagtttatagatttttgaaatattataggsatgatgggtagtcattgtcttttatcttcccccatccaagccttacccaaacctccaggaactcctgtagtgacygagagcacagctacaagcatcacactgacgtgggactctgggaaccctgagcctgtttcttattacataattcagcataaacctaaaaactctgaggaactttacaaagaaattgatggggtggcgaccacacgctacagtgtcgctggactaagtccctactcggattatgaattcagggttgttgctgtcaataacattgggcgggggcctcccagcgaacctgtgctaacacaaacctcagagcaagcrccatccagtgccccgagggatgtccaggcacgaatgttgagttcgaccaccattttggtacagtggaaggaacctgaagagccaaatggasagatccaaggatatagagtttattatacaatggatcccactcaacatgtcaacaactggatgaaacacaatgtagctgacagccaaatcactactattggcaacttagtgccccagaaaacatattctgtcaaagtcctggcttttacctcaattggagatggtcccctttcaagtgacatacaagtcatcactcagacaggaggtaagtttggttgaggagggaaatagggcaggagggaagggctggtgcaaagaggtgagaaggacaaaaacaaagaaggaacaaagatggtatgaattttaatttttgagatttagggcttcaaagcaacagatgatagatayctgaaaaggaacaagcatggacatctgaaaaactaatcattttgagcagaacaatgcattaacaccccttctttttaatttgtatgggaatgacttgaagacttctctatgtgagatagaacaatgtctcccccatgcccagttttgagaatagaaaaacgacacttctttgtaatagctagtatggtagagtggtctcaaaagagtatttaatttgtgtaagattggatggttcaagacaaagctaaaaaataaaactgttacagggccttgggtatttaaatggcttatatttgccagaagctactggcttgaaaataagtattctctgagtggctttaatttctgtttttctctgtatggcctcagtggataaagagagacagttaccgagatctcagatagaacattgggcctgattgattaactttgctaagagctacagcagacattagactattttatgaaggaaaacttggccctcccagtggttttatttttctaagaggttatcaaacctctttggtctttgagtcaaggtgatcagtttggctttgggctaatataaaataacaggcctcttctaaagtttattcttgagccacgcacagtggctcacgcctgtaatcccaacacttttgggaggtaggtggatcacttgagggtcaggactttgagaccagcctggccaatggcaaaacctcatctctattaaaaatacaaaaattagctgggcatggtagcaggcacctgtaattcctgctactcaggaggctgaggcaggagaatcacttgaacctgggagatggagtttgcaagtttgcagtgagctaagattgtaccactacactccagcctgggtgacagcaagactccatctcaaaaaaaaaaaaaaaaaaaaaaaaagtttattcttgagcatctgagagctacttctttgactccttattgtgttggcatcttttaaacctgcattaatctacgaatgttttggcatcatgctgttggcttgttttgaaatctacataataatcatattattggagacagtataatctgtagacataactcattgctaatcctggcaatgaattaataaattttctcagatgccagtactagataatgtacctatcatctatttcactgatacstgtgaatcactgacttgttttcatggcatggtctttatatgaagtatgtttaactatttgtccttgcttctaggaatctcagagcacatttatattaatagttcgcctgcctttattttcataccattatttggttcttattggcttgttcatggatttactcttttctctatgacattgtaggaaagccagctataaaaatatgtctcaccacagttgtattaaaaactatccatatatcttctctgtgtgccatttgcagtacttctgtatttatttgctgtagtaatatgcagaaaaaaaatactgtaggctgttcttaccaaaaaagcttctcattgggaaatgtagacatccgtaaatcttgttttgctttttcttgactaaaagtggttaactattatgagattgctttttattatactgttttagcagctacataacaattaaaaaattctaagaaattatatgggaacttacattccactttgagctttttaaatttctcagctgtgattattttttcaatccctggtcttggagtaacataaccagggtttgaagcccaagctttcgtttattagctgtcaccttaggtgatttatgtcatctctctctgaacttcagttttctagtctataataataaccaccttatagagtgtagtggttctatttgttttctagtgctcctgtaaaaaagaaccacatactaggtggcttaaacaacgggaatctattgtctcacagttctggggcctagggagtctgagatcaaggtgttggcaggattggttccttttgaaggctgtgagggaaatatacttaatgctgctgccctaacttctgttggttggtttgctggcaatctttgctgtaccatgacatgtagaagcatcatctgatcactaccttcatctttacattatgttcttcccaaaagcatgcctatgcccaaatttcccttttcactagtacacagtcataacggacttggggtcactcttatggcctcatcttaactaattccattgcaaagatcctatattgaaataaggttatgctctgaggtactggggatgaggatgtcaacatatggatttttgtgggatgcaataaaattcataacagggtatagattagataatggagggaaacattttgtaacttaatatgtaaaacattaaattattaatatgtaatcatcataatagtagctaacatatggaggacactatactatgaactttgcatgtatttattctcacaaaccaattaggcagatgtggaattatcccacttgccaatgagtaaattgaagatcaaagaggataaaacgtgattcagaaacttgccgtaggtcgtaaggttactaagtgcaaaagcagaatttaaatccagggattctggatacttttaactgctgtgttagtccattttcacactgctataaagagatacccatgactgagtaatttacaaaggaaagaggtttaatcgactcacaatttcacatggctagggagagttcaggaaacttagagtcatggcagaaggtgaaggggaagcaaggaccttctccacatggtggcaggagagagaagagcaaagggggaagagccccttataaaaccattagatctcgtgagaattsactcactatcacgacaacggcataggagaaaccacccccattgttcaatcacctcccaccaggtcccttctttgacacatggggattacagtttgagaagagatttgggtggggacgcagagcctaatcattatcaactaccattaccttttaaattaataatttgcttaatgtgatagtttttgtgtttttatgccagtgtaggtattcaataatgaaaagaggcaagagagaaaaacgcaattgtttcatttattcatatatttatctaagaattatacataacttacttctgaaacactgaggtagctattagattattccagtgcagaagtacatgaaaacatttagaaatggaaaaaaaaaaaaaaactaagtttatctaaaagaagtggaaggaagaacatttttatgaaagatcgttacactcaagcagtaaatytggctgaaatttaactaaatttaaataaatttggctctaagttttataagcaccagtttaaacatagaaatctatagtgtttcatatttttattttctgatggtaggaagattatctgagaaacaaaatttttcctaaacctaatccaaccaaaatgtgaatcttagacaattgtgagaatccttgtatttagaatgctaaatgaaaaaccctgatgccttcagtcgtaatctattgaaaaatatagaagtaatgttgaagtagacagaccatatctttatttttttatatgaccagtggacagaatatgacattgaatcataactcagtgaaggtagcattatcagaggggcaactgagttactgtgagctggggactctactttcaaaagctctgatttaatttaatgacagaactcagaaaatctagatgaatgggacatggatatattagaatagttattcccactctgtttaactgacttttttgcatgaagatgtttccaagaatcttccataatagttttacttttaatacatgttgattgagaagatatatagtgatgtaatgactgcctgccaagctcaataagctaagaaaaccttccaaaatagcacaatgatttgatctgttctataggcttaattaaaaaggccagtggatattagtggacacctaccaaaaacaatgatgtttgttctgatgtaattaatgccgagctgctccttaagaaaaaggagtaacaagaaagttactgactaaagaattcttaggatgattgctaggacgataaccattatgagatataaaatttaaggatatgattattttcactgcaatttttctcctctaaccctataaaaatttactgatcaataatatgtaggaattgaagtacattttaaatacaaatacacagaaatgtacattttgatgtcttctgtgtctaaaaggtactcatttaattttattatctttcattctgtgacattcacattcctgtttttgtttgaaaccggattccaaaagaacagtatttaggatcaaagtgagtttaagagagaagtctcacttttgatttgatctaatatgagtcacacagatggacataagtgaaggattgatgtaaatttgtgtatttctggtaatacagaaaatgagaatatgatctgtctgttttacagtcagagagtttttctccttgattgtgaacattagtacagttgaccgtgttgagtaatctttaaatggttttaaatatgaaaagactttcattgagatgattattttctgaaatatgggtcaatcttctcagttctccatagctctaamttctggcattacaaagtcacttgcaactagtttaccttgaaaatatggggaatatatggccattgacaaggaaagtatttatattaagctagaaaaatattttcattattagaaaacacattcaggaaggaaaaaaggacctcctatagttttcttgtaaaggtaattgtaccaaaagcatagggtaactatattttatagaagaagtagaaataaaactctgacaaagaagtagtaagttaaatctcaaacctaatgcattaaatgttgcttgatgttcatgctaattagaggcattataaatcttaaatcctaatatgtgtcttttttctgaactgtatttagaaagcatgtctgacctctaattacatctattcatttaatagattcttgaaaatcatctgacttatatggatatacctttaacagtatatgccttcaaaagataaagaattatatatatttatcaaatactaatgactagtatcaactttaaacattttagggatgttaatgctattacaaattctgggcattgcaaaagtgttaaaatataagctatgacattgagagacaaagtctgttaggtttccagaagtttataaatcatttcattagtgtatgtcaacaggcctatacaagcaaactagaaaaagactgctttctaataaccaaagttatgagtccaatttaaatgctttttctgaatagatttagcaatgagtaaaggagcactggatataaatacaactataataaaatttaactttttctcatttatatttaatgactgttgagaataagatttgtgctgatgcttgtgtattaagtacttattttgtcaatgatatatttgtggcatttacacatcagactctttgttttgaattttgctttgttttactaccgttataattctggcygtcggttttattgtcattatcatttatcaatatgctagatacacacattttaaaacatgtaccttartaaaatactggatattttagcaatcatgggttttctagtatctttggtcatatttcatatttatactatagcaagatgaaactgttgtttagcagtgcaatatgtgtcaacctttctttagagataatctctacattttattcaaatattaatctcttctaatatatcagcatctgataatgtgaaggtttctcttgttagtctttttcatcccttgtcttggagttgctttcacatatttatatagagtgtaattatagtaatactcaagtacttaacatgtatcagtaggattatgatctcattttagggactcgatagctcacatttctatttccttgtggacattaagtaagtaatcaagagggcggacatacttttacagtatataatgacttcttaaatataatattaaagaaaaatttttgcttcttttatttttgctttccatgtcctattgtaaatctggtttatggtcaatatcatatctctcctttgaatatgaagtaactgcttaaaggtctggatatgttgtttttatttgcccatgattttcccagaatctcacattttcttataaaatttatgttcagttaatcagtgaaggaaatgttacaacacagaaaaactcttgaataaaataaaaataaaataagatatacatagacaaaggactggtaagtgaaggttaaaaaaaaaaataccagtgagaaaccgtgatgtgtagtgattacaagagcataaaatatctgtgtgtaagaaggcgaggcacagtggctcacacccatactctcagtgctttgagtggtcgaggtggaaggatttcttgagcccaggaagttcagacaacctggtgcaacatattgagaccctgtctgtacaaaaaacattaaaaaattagccgggtgttatggcacacacctgtactctcagctactcagggggctgaggtggaaggagcacttgagacctggaggtcaaagctgtagtgaaccatgattgtgccattgcactccagcctgggtgatagagtaagaccttgtctcaaaactaaataaatatataaataaaatgtaggtaaatatttacgtttatacatttatatgtataaatacatatatagagagaaaacattaatagaaatgtgaaatggaacctctgtagacccaatatttggtataaaaattcaatagacagataatgaaagtagtcccatgtctcaagtgttccagagaaaacaaagtgttttcttatatacatatattatgctcattaggaccaatatgttgggaatttaaaaatacattcattttataccttatttaaaaaaattcctttgtgtcctcagcttcatggttgtggattcaaatatgacaaaatgccctgaggaagtgatatcgttaggtacaccctcagttcccgaggaagtgtgggtagtgcactcttaagccattgatgagcctggagcctgagatcatgaaagtttatttcatggcccatatgctgaatctagcctgtagacacattttgccccatacagtgcttttaaaattcaattaattttyagtaattaagaatggaaaggttttacctggaaggttcatgatcaacttctgtgaaggaaatcggaagctgggacaagagtgcgcccacatttcacaaggcagcaacctgctgtcactgagcatggcctgcggtccctcttcaggtggtgggcactctccaccgggccccaggccccatatggccttctcactcatctaaattacctgacacctctgagcatttgtattcgcaccacatgtttattttatatattattatttatttatttatttttagagacagggtctcactctgtcatccagggtggtgtgcagtggctcagtcatcgttcactgtagcctcacgctcctggactcaagtgatcctctcacctcagcctcccaagcagctgggactacaggcatgctccaccatgcccagctgatttttttaagttttattattttgtagagacagggttttgctatgttgcctgggctggtctcraacccctgacttcaagccatcctcccaacttggcctcccaaagtgctggggttacagatgtgagttaccatgcctaagcctgaaccacaagtttaaaatctaataaatgaagttaacctccgaaccatttcaaaagaaggataaggaaagaacaggagagaaccccctgtacattagatgaagacactttgcatcaagtcrtctagccaacctttagctttgtgcaagaataaaaaggacagtgtactctctgagacttggatgtgcctacttaagtcattatttagaaggaaggggctcttaatagaaacaagcagaattagatgatcagacaaagcttgtgtcactaaacaagaatgaaatattgagaccaaccgggaatttactcaagacaaattaaaagcaaaaagtaaacagtttaagtaagaaaaagttaattaggtttccaagatgttttcaatcaatgtcaatttattattagcattaggcagggaagaaatgcgtaacaagcaattattatcccgagagcagcccttcagtgttgtctgtgtttctaattcttgaccatactgtastccggtttggtttgagtcaggagttaacacaaactttcttgtttcccaggaaattgggagaaagaaagaagcaaataaaactaggaaaaaaatcagtgactgcatacataggcatatgtgtgcatttktagcctgagaaacccttttatcatgtgaatattaggttaggtcctatcataattttcccatctatctggtcactcttgtttccattattgctcctgccagtgcttttggtatttcccttttagaaataatgcattttccatttgctttgcagtttgcctatttgtgttttgttcccctctgtccctctgcctcttgcttctcaatcttttatcttctttcgcttccacctttcaatctaaatgattgtgttaggtcacccactgggcaggtactggggaaaaaaatgtgatactctgttcagaaggtaagctcccagaggcatcaaatcaatgagactctcaaggcctgtgatttttaaaaagagagagagaaaagatgatgaaggcaactagaaatatgaagcactgattatttgtgaccttaagcatcagtccaaacatatattcctttacacacacacacacacacacacacacacacacacagacacacacacacacayatatatacacaggctgacttaccagaggaataaaattatcattaggaattctacaaatcattcttgcagactgctttaacaaagggcattttttaaagccatagtacacagacataactataaaagaaaaggaaagcaatacattttctccaaaggcttcttttgaactacaaattatactgtattatatgtatttttaaatatttttgctgaggttgccactttagatgttttaaagcacactttagatgtttttttactcctctgctatgaagtattattgttctctttttttctttaaatataaatggaattcttatttaaacttgagggaatatgaacatatgttcagccacagcacattgagacatgccataatatcaagggtaatgatcaaaatgttttacaattgggaaagcataggcactcaccaatcagagcagacagtggccaagaacaatgtacgattagatgtgccagcgacaccctgactcagccttgtgtataatggatagaggggaactgataggcttaggtgtggactagaaagtttaggttastaattattctagttcatttgagtaaggtgttttaaactgaatagactttccattctttgttacagctgataaacagctcttccaaattgtctgttgaatagatgacatggctaacatgagaattatagatgatctctttaagttaccatatttctgataagtgtatyctataaacttcttaatttttgtagtagtttagctttgtggcactagagaggatattttgtttgtattaggtgtakttctttaaataatttaacrtagtttagagattagaagtcattatttgtaagtgatagmgttttgttttgttttgtttttcctttcttacacctcttcttcaaaatgtgggctggtaagaaaaaatgctgagtgattctgtttgcctgttaggttttgttattggcgtaaaggtaggatttcataaatttaattggaaataattttgaatgttacatgtagtgctagagagtaagttcctactcagttgtaaataacaatacttttaggtattttgtacttattatgcttttggcaatatttcaagtgctttatgtaaattatattatttattactaacaaccatatcatgaagtaaagaattttttccttaaaattgaattcagaggccgatatactttatacttattagttctactatatcttgtgtagatgttctactactccagagcaggatttataacattgtacttgccctgtacacaaagaggttaacttggacaaggtaaaggagcttgttttccactaagctggtacatgtgtacagatttcgaaaggtttaagcaggttacgctaatggaagaactttgtgaatactcctggtgattgtgagttcaatccattgcctccctgtttttagtaccagggcagccactaaacttcaaagcagaacctgagtctgaaacaagtattttgctctcttggacacctccacgttcagataccattgccaactatgaactggtctacaaagatggggagcatggagaggaggtaagactatagtgcttctcaccttgggaattattcattacgtggggccacttttttatttttgtgtatttatccacattcttggtcagagagctattgaggaccttgatggaaaagatttactaattaaaagaggaacttgactccccctcccccccaagaaaaaccccaaaacaacaacaatgacaaaaaacagtggttatttggaggctttggggaaaaacaaaacaaaataactcttgttcctgttggaatgtgcttctgacagagttccaagttccatagatgtatcaggttatggaagaataaatactcaatgagacttgaggactttctcttcttcatgaaagtatttaagtcactgtggggacaggtgactaaattagctctatatgttaatgaaagtccttggctagatgaatttttccaccctggtttcaaagattccccaatagcaaatgtttgtttgctaaaaagtatttggtatgaaggtgagtgtgtataacatttgagtatgctgtgcaaatgaaataacagattgtagaaggcatggcaattgttgatcgtcactgaaaagagaaatgaaaatcaatataattaactcattaatgggcactgttctaagggtttcaccatcaataatgcatgtaatttttatagtagcactggagctagcctttcttattaatcgatttgacgtataataaaatggaggcatggaaaaaaagttaaataatttgctcaaagtctcgcactagtggatggcagagctgggatttgagtctaggcagtcgagttccagagtctgtgttgttaacggttagggtctactgcttcttgagtgcagtttgaatacatgatagaaatcgatattaagatacatctaacattttcagaatgagaatacataatagtagtaagtatgtttcttttattattgttaaatccaatggggaacattaggacaaaaggagttaatggcactgtgtttgagaacttcacacatatattcattttattatgcctcttagcattttttatctgaaaaaaaaatcttcacaaagtgaaacagtccctgtgttctaataaagaatatcttttaaaaaactcacatgctaaatgaactactctcaattaacttgtagtacataattttggatgttataataaattaatatgttcttgtaaacttctgttttattccatctgtttgaattgagcagaatctcaaaagaataggttttaaatgcagtggttttagatttagctaacaaagccaatataaatcaagcactcaaaaagttatatagttgaaatgcagatatgacttaaagttttcatggtacaacttgagctattggtgttttctgtaaggtgtaaatcagcactgaattgtttaaaccttcatcacgaccaccaaactaaaatacaggcatacatagacacaaacatacatatatacaaagagtaaaggagaattgtgatgcttaaatgttggcatagctactgtgctccacaattgcttatttagggaatttctttatttcttacttggtggatctaaaattcctgaaaacttttgtatttgtaagtcagaacaccctagggatggtttctctagttttatatttgaatttttcttcttcttcttcttctttttttttttttttttttttgagacagagtctcctcactctgtcgcctagactggagtgcagtggcgcgatctctgctcactgcaagctctgcctcctgggttcacgccatcctcctgcctcagcctcccaagtagctgggaccacaggcgcccaccaccacacccggctaattttttgtatttttaggagagatgggatttcaccatgttagccaggatggtctcgatctcctgacctcatgttccgcccgccttggcctcccaaagtggtgggattacaggcgtgagccaccgtgcccggccttgaattcttcttaactgatttgtttgtgtgaatagcaaacactatttgataaagtgttaagattacacacaccattactagattatgtattcacttgcattttaaggtttactgcaggctgatgttcaagattgattacccatagacacttatatttttgctaaatgacaaattttaagcacggaaggtgagagttatagcatttgattaacgaaatcgtatatcaaaagtccacaaacatttgtgaatctaytttttttctggctgtgggttctttattcacaaagaaagtaaggttttcagttattttagatcaacctagggtagtaatgtggtttcagataaattattcaactttctttagtgactaacgtgatattttacccattaaaacttggcaatttcaaatctcttttatagcaacctcctgtaaattgtatactggttactgttgctacttctggtcatgttttctttgcctccaattgagatttcagaaggtcatgggagatgagtagacatctgttcaattaaaattgcacatgttgggcagattccactaccaggggcaggtgtcattttctattgtgatctgtgtcacagcaacatacacacatttaacggcagaacatactcatgggtgttggcctctcaatcttcgtcttatctgatgtatttggctgactgtgtcaacattaaaaagatctctgacttcccttattccagttacctttgtagaaacttgccttttaaactgatattttcattatataatttccttagtatagccctggatactcactattgactcttttggtgatattttgatgagattataatcctgatgatagaaatctgatggtccagacagtatgattaaaaagtatttgcatgaaccttaatgaagatgaccacattctcttattgcttccagcaacgaattaccattgagccagggacatcatataggctgcaaggactgaaaccaaacagcttatactatttccgtctggctgcacgctcccctcaaggcctgggtgcttctactgcagaaatatcagctagaaccatgcagtcaagtaggtgtctctctttgcttactttctgcctttttatttcctcggggagatgttgctagctttcaccttcaccaataagcaaacctgctaatatgcttaatagttagtctctaggttagtatgcatcacacttcacaggtgaaagtgtaactgtgacttmttttggtctcatcacttgatccaaataacagatcccaccttcccacttcctacactgaaagacttttaaagaaggtagtagacgtccatgggtgaaatgtgggtkaaaggagttagatcaagccctgtttaatgaattacaagtctttaaagcaaaattcacrttgagaaccctgtaaaataatcataggagggcttcgcaaatgaaagaggctgcaaaagacaaaaaaaaactttatttttttaagcacacaggctttagctttgcaatcaaacaagtccttatttcatgtatttgtttctactaagaaaagctcagctctgatgacttgtttcttattaactctgtgtgtagtacctgtggaaatttggaacattgacagaaaatctgtatgtggacaaattaagaaacaatggaataatcgcaaacatatttgcaattctaaattgtattttgtttcctggggttcaatttctttttggagctgttacccttaagcatagctgtgtttatcacaatgggggttaattgttcccagggcagattgttttgcataaagtattatacaggattttgtttttggtggaaagtttggtggcttattattattaattgctttttattagtatgtgtttacagttcattcataaaaaatactatttaccttgaattgaagagttttgttgagttattttcttagatttctttgtgtgatattttgtctttactttttgacatagtgaattatacaatagatatctgtagtagaaatacattgaattttgtcaagaagatgctctgttaacctcatatttagacctatcagcaaacatgaaatttgtgatttaaaagattcatttccttccatacaaataagcaagttttccaccatttcattttctatagaaacttgaaaactttcagggttttttgataataaaatttatgtttttccctctttaaagcatgattattcacatgaaaatgattaggatcatgtttaatctattagtgattatcgtttattcccataaaattttctttcatttaaaggcgtaagcatgtaaattaatgcgttctctgtatgtctgctttgaattccaggcaggctaataaatagtattgtagaagataatttctaaaaaccaagcctttaattaagagaaatgttacatgcttcaatattatatttcccatggtttacaaacctcagtttttaacatatgtgtgtgtgtgtatatatatatatatacacacacacatacatattgaatagactttttataagcacatcaaacacttatctattccttattttattaaagtaaaattttcaaatggtgttgaatatattctcacaaaatagraggtctgaagatagccctagtgaaaaccaaatcagctttttaaaaagaattacagatgagtccttgctgttacatgaacaactcaatttattatgaataatgataatgcatgtaaaatagttttataatttgagatayaagaacccctagtcagaatcaataaaaatgagattctagtggttttgcaaatcttattccaaatttacaaggctgtcctatgaggatttcttttttgtcartrcagagagcttttattttgatggactgtaataatgaacacaaggcacgtacattaagaaagactgataatcccctgaacaattggatacacctggcactccgtaatrttaagagtcacaaagtctagggaaatccccagactacacattcaaatatgaaatataggattgctttattcagtctaccatatacattgctttaaaaatatatgcgtgtgtgtatggacttgtgttatctttgcccacttgtttgtttttctttaggaacataatattattaagttttaaataatgatagtaattgtgctgtcttttattgatttttaattttttaaaatcataatgcttggttaatttgatggaaaatgattgctcagaaagtgactagtttaatttagaatgggcagtaagaaagtatgtcttytaattctaatataaaccctacattgtatgaataattatgtacaaaatgaaagaaattttgcacagaaattatatcttttccagttgatrcttgggtttttaaaaaaacagttctttttaatggctgtgttattgacattttgtaagggataaatgattattattgattttaccaaattttgctggtggggtctaattcttcactagcaatggtgtctcaagaagagttataattaaaaagctgaaagctgacgtagggtaagtacaagttacagtcagaatcaacaatcctgacattaccctcgggtaggtaaatcttggactctgcattttcatcctttattgattctgcatgctcactgtatatgggctaygatcaatgttaacattttttttattattaaaactggtcaggcaaactcagtttttcagatagagtgaaccctcttatgtttgttgtttatttatttttaattggaactggtagaagggcattagcagttattgcaacttttcacacttaagaagcctttcacaaatgagtactgtatgtaaaccatcctcattctagaatatagaagtgaaagcttggaaacatctgtgaggcatcatcagaccctcaagtaaatactagcactatttgcagcttttttgaagctgggtagtcagtatagtgggggtgggagatactgagggattggtttagaagaatttttatcgcaggtaggtaattttatttgaggctccattatctcgaggtctcattttcacatattccccctacccattatttaacaattatttttggtcattaattctctttttggtttattcatattactaagccaaggtacataatttgtcattagaatttaagtttcaaagccttattttcattttgtccttattgttcgtttatttatttttgccttttcttttgttttatcattttttttttcaaccactcctgtcctttcacttaaatcctcctttaactcactaccaaaataagagccgtcagctcctcctcaagacattagttgcaccagcccaagttccactagtattttggtaagttggcaacctccaccagtggaaaaacagaatggcattatcactgaatactccatcaagtacactgcagtggatggggaagatgacaagcctcaygagattttgggaattccttcggacactaccaaataccttttggaacagctggaaaaatggactgaataccggatcactgtgacagcccatacagatgtcggccctggccctgagagcttgtccgtgttgattcgaaccaatgaagatggtatgttgcctccgctacgtcagtttgcacccttctgacacagtcttgatctgctgtctttcawtaggctcacagtaatcttttttctctgctcatctttttacccagcattgctgttactttagtatttttgccaaagacttgtctttgctacagcctggccttttttttttttttttttttttttttttttttcatttttttcaatctcaatgcagtaatttgcttctytttaaaaraactgttggctcctatggtcttgcagtccagcccgtctctgtgcctccatctaaagtcttctgkgtttttcttggctttttgtagtcacttcttttacattttgaagttaacttttcaaaactaccttcttacctttttgttgcctttttgtcttacatatttcagagacattgatgctcaacattgaatttttggcatcttttgtatggaataactttgatatgagaaaaaaagagaagataatacatataatcaagaatctttttattctgccgtttaaaaagaaacctttaaaaaacacacaacaatcaacagccagtttttgttattatttcaatgctatacctctttgtgctttaatgctttgaacctcaaagcatcttccttggcttttgtacattttttacatgtttttctatttctctgatactctttttttcttccattttttttttttttttttgcatcggtcatgttttttgatcttttcttaaaaggtagagcagattggttaagcattttcattggttgaaaatgtttgtattcttcaaagraaacatagtgggtttacccattttttgaaagagaaacctaagtaaagaaaatgcagaaaatgctctgatagggtgggacaagtgcctataatttcttttatccaatgatgttgttccagttcctagtggtcctcctcgcaaagtcgaggtagaggctgtcaactcaacatctgttaaagtctcatggcgctcacccgtgcccaataaacagcatggccagataagaggatatcaggtgcattatgtgaggatggaaaatggtgagcccaagggccagcccatgctgaaagatgtcatgctggctgatgcacaggtaagcctctgaaattatgtacctctgtttttatataataagtttatcttagttcatatcctgaaattgctcttattttagtttttcgacatttaaaaaatcctatacaaaattctagttttcatttcacattgatgtatattgatcttttcaatcagagttactatcaagtgaggaagggaattgtaatgaaatgacactcaagtctgattaaaaacatgttactttttccttaaaatacagatattcaaccctttacaaccatatttgagtttgcctttctgacttcaaaaaatgattgacttagttgagtcaaagggaagatttctaaactgcaattttgctgatggartctactttcttctgtgctaaaacaacttgcaacttagttgttctaatttctaaatgtgtgtcttcttccactgaagaayagacatttttattcagggacaggtactcagtattatatttagtacttcttcatcaaattacatatttgatgaaactcattgtttcatgtcccagcaaatgaagatcgttacaatgatattaaaaattaaatcagaatttcctagcaaataagtgggatccttacgttgaaccaaggtttaaaaaaaggtactaaaaatgagtarttgagtatgtgagaaattgtattgatcttagggcagtggtttgcaactatggtatcacaacccggttttataattagttgtttaaaacagagcattgaaaatttccaaaatttttcataaattagaggtgattcaaagatagtcccataataaattcgcttgagttttacatattttcctgaaaggaagatgaagatttcatcttgtaaccaccatgctgaaaattgtacatgactcatgtactggcttacctttgctgtgtcaaatggtgatgagatgtcatggggataggatattatgatcattggaatactttcattatccaagaaattggtgacttggcagggaaaaggatggagtttgtaaaaacatttgaaatttatttcaaatgaaaatgcgtttctttgtgtgaaagttggaaaggttatgaagcaagttgaaaactgcggcaccaggttgcccagttctacgttctcgtctgtaaaggcggacggatcccctggtcaagagatcgagaccatcctgctcaacatggtgaaaccccatctctactaaaaatacaaaaattagccaggcgtggcggcacacgcctgtgtggtcccagctactagggaggctgaggcaggagaattacttgaacccaggaggtggagtttgcagtgagccaagatcgcaccactgcactccagcctggcaacagaggaagaytgcatctcaaaaaataaaattaaaaaaataaaaaaataagacagcaataaatatycctgtgcctctaaggaaagtacttacccccaaagtcttaatacaagtcaactctcagaagtctttatgttttcttcagttttgaaacattctaagtaaagggatctggattcattgctcacttatctaccccgaggccacttctgtaaatgcagtagtgcttcgtaataccccttcaacactggaaaggggccattgacttgatttgtataaataattattatgtagtgcctataaaaagaaagttatcgtagtataaaattaaagccatcattgctacgttttatcttgtaagtctacaattatggaaaagaaaacaatatgaccagtgtgctttggtgttctcctttggttcttagatattttacattacagaactgtaattctctccctagttccattgcaaaatatggtagttaacgaaattatataataccaaatgcattaaatgtgaactctgtctttttttctcttcttctttggcttttctttattaattgctgtttttccttgtgtattttctttctttcccatctcatttactttccttgactcttcactgaaatttcattacatctcacaggacttcattgaagttataagtgtcaaatataatgaaagatattaatctaaatagtgacttttaattgtgtaacttaagatagaagtcaaaataaatacgagtaggatatgattagaaacattaactttttctgtgcctcattgctatgtttcagtgaaccatacatttaaagaatgttagctggttttagtgataacagtaacaaaggatatttaatttgacttcccaatcagaggtggaggtggcagcaaatcacacattctttggaattttattgtacacactgctttatttttttgatttttttaatctaacaagggcaacactgcctgtataaggctttaaattctttttctttttattttgttttcctcccaaccttcttattctcaatcagtgggaatttgatgatactactgaacatgtgagtaatttttgactgttttgtcaaaagcagactatatatgcttgttttctctgacatcctttcacttatttgtgatctgtcatcacagtttgcttggatgcatgaactaacaaattatttttaagttatcttcactgtgtggtgcactttttattttggtttttgttttgtgaaatcagcatggtgctattgactgcgtaagaaatgtcatgggcttgtgatatttgttttgatggctgctactaactctgccttgtgacagtcagaggaggcatgctttaaaacacaggggtgttgtctaatcttttggcttctctgggccacattggaagaagaatggtcttggaccacacataaaatacactaacattaactacagctgatgagctaaaacagaaaaaaatctcataatgttttaagaaagtttacaagtttgtgttgggctgcatgttggataagcctgctttaaatgaaggcattgcagactggagatgtcagattgtttggtgtaggctgctcataatgctcataaatctgactccaggatcgcatatccagtagataacaagatatagatctggcactgattaactctaactagaagtggctgttcttcactttacccatacatatttgaatggtgaatggattatgccaagaagtagaaagtatgtcgctgagggaggaatgtttttaaaatatttgaatgaaaactctatgttatttattgagggactgttatgtatatgccactgcaagggacacatgatgtgacacctgcctttctagtgtttacattctaagtggctagggaagagtaaagttctgaaaagtttcatagaacgcagcaaaatatatggcctacagcagtggaccatgcattagtaaattagtggacagtgtcaataaaagctatgaattcagagacagtggtccaagatagtaaaagaagtcctgaagcttagttgagaatttaagggatgactaaagactgaataagtgaaaaagtgtgtgtgtgtgtgtgtgtttgtgtgtgtgtgtgtgtgtgtgtgtgtgtgtgtgtgtgttggagagttggaggtggaacatacatattttttaaagttgatcacagcaaaaccagtcattgagacagttgagcatgtggtatagtcacgtgacagtgagcctgacaatttgatataaatgaaggcttcgtgttaagtaactcagtggtaaatagagctaagaggtaaactataatataatactgggaaaaccagaagagtcaagctaaaaagctggccggtcagtctttaactcttcaatattagagtgatatagaagaaataaaaagaaaaatgagttaaaggctggcaagacggtattcttccattcactgaatgaatatttactgccaatgcacatggctcttgttgggaatcttgtaactgtgtgcaaggtatcagttctcatgggattgccagtgcagcagcatttttgaccgtaaacttctttgactataactcacagtaagaaatacattattgtatgtcatgattcaatgcacacctctgtttaactaaaataaaatttttatagaaccatgctttaaatgtataataaacactaacattaagtattcaagtttattccacttcattttctgtttgtttgtttctttgtttaaattctggtcatgactgactaaattgatttcacaacctactaaatgggtcattacctgcagtttaaaatccagtgacttagtggatagattagagagtaaaaaggtggcagataggaaagcaggtaaaaagagttattttgctaatttagtcatgaagtgataaaaatgcaacagagttgaggcagtagaaatgaaaaagtgatagttaggatcaataaaaggaagaattggcaaaaacttgctaagaactgaggaagagaaagaggtcaaagatagctcataagttttgcagatgtgttaccgttcattaaaatatggaagtaaggagggggagtctacttccaggaatgatttttaagttttagttcatttgaacttgaagtaacactgggtagtcacaggaaaacatctagcagatatttacaatgtatatgccactggagctcagattggaagtcacagctggaaataaatcaggaatatgggcagaaataattatttaaggtttagaaatgaatgcagtttyttttttaagattagagaaacagtagaccagtgactgtgacagaacctcaggtatgccaacttttaacagtcagggacaagaagcaaagtggagacaggmcaggaggaaacaaagagaatgaggmattatggccataatatcaggcacatcacctcacagagcatactgaaacaaccaaggaaggaagtgcacccaccacttaaagaaagaaaatgtaatccaagaaaggatatgaccgtggcagttggaggtgtgtccagccgagattataccactgcagggaacttgacgcatttcaaattgcgttatgtctgttatcctctaacaacctgggcaagataatggatatgtgtggttaactccaatttcatgataagaaacatataagtctcagagtgcataatttcttgctacaaaatttggtgatggaagcaagccttgctgctttttccagttagccatgactgcttttcagcagtactccagtggcatgtkaggggaaccttggaaaccataatgttggcatttactcatgatagtttttgggatagccagtgtgtctgctgtcatttaaaatactgctcttgggtagtttacttggtttttctatcctctggaatgttagggaaaccattccaaggtcctggaaatacaacatttctcccaaatagtccatttatctggcagaataaaatttccagtgactcttcaggatgatatctgaacttcttgaatttccacagtgagatattcctactcttttgagaaagcatgttcccagaaactgtcatatttgggatcagcttcaacaattgagctctacggtatctgttacagccttgctaaaaaaaaacctactgtatttcacacaatataattcgtactcgtcactcacattgtctttagatttggaagacaatgacattgtgcattttcctaaatttatccatattcaatttgaaaacacagctgtgccaaaaatctgaaagggtttttatattgctgtgtgtgtgtgtgtgtgtgtgtgtgtgtgtgtctgtgtgtctgtgtgtgtctgtgtgtgtgcgcatgtgtctgtgtacgcgcgcatgtgtacatgcagctctggtatttgttcttaaaatactagaataagctaatagccagaatctctaaagaatcccataacctgcagtttaaaggaatatatcaaagagcatctggtcttataaccaccacagctttgggccctgactaagagaaaactaagaatttaggtaaatagtatgtgatatttaacaatttttagaaagtcaaaataaattgagcacatactagtgatgtggtaaaactaaagtcctgttgtattctttgcttttatggctgctttttaatgtgtgtgaaaattctcctcagtggataatgatttctgctcatagcctatacaaataaccaataaaaatgataatacaatccattaataagagagtcctaagaaaattctctctcagggtatctaggtccaacaacaaccatttggcaaaattcgtctatagtgataaaacagactatgctggcatcagccccatctgtagtctgtgggttacagtggatatgtgtggagagctgttggcataaaataatcactctttaatggaatgcttcctataagccaggcatagttctgtgagtttacctgatataactcatataatcctatggggtcctattataattccaacattcagatgggaaatggaggcacagataggtaaacatacttggtctgtccaagctagtaaggacatgcaagtttaagtttaagaattcaggaagtctggctccagatttcatgtctttgactaataccctaagatctacctcccaagatgcctgaagatgcsccttcgatatcagcatgaaaacagatctccatagcatgagctcaggcatgaaatttccagggcttagcatggctgcaagggatgtgcgagcatttgcagaatgaaggcagacggccttgtttttcccccagagcattagtagcatgttttgaatcagtgacattctattttgtcatttcaggacatgatcatttctgggctccagcctgaaacttcctactccctcaccgtcacagcctacacaaccaaaggagatggwgctcgcagcaagcccraactggtgtccaccactggggcaggtaatcatgtctgtgcatgtatgtgccttgaacagtaatactaactttttaaatggtataggtagcttctagcaggcttttattatagtaaaatcagaggaaataaatggactatggtcaacttttgtgtttttagttcaggggtaaaaaaaaaaaaatagatcagggaaaaaaatagtccaagtgcataatttgtccaaactattcaatcagtcattcaataagtattttttttttttttttttttgagcaccttctgtgtgtcaggcactgttaccagcactggggatgaagcaatcaacaaaacagaacaagaatctacactcatgaaattcactttytgaataggactagataattaacaagtgacaaaacgagtatataataaaatgtcagaaagtggtaaggtgaaaagtaaaagcgtataggcaattaaggatcaggcagcctctaggggctgagaagttctggtagaggaaggattatttaagtcgagactcaaatgacgtgaaggatcaagtcccatgaagatctggagggaagggatctgggcagggaagtcaagcaacaatgtcaacttccctggaaaacaaatccccttagaagagctgccatcttgaactgggttcatgacttacagttctaccttttgtcattttgtcttccccaccccctgctgtggggattctaaagaagccaaactgaacaaaagatagaaaacaaaaaagaaaaagaagaaaagcaagaaggctaaatagtataaaattactcccctctaaagaataaggtttcttcaatgctttttaggatgactttggtcagccacagtaggaaaagccagcatgaaggaaaatctggcattgtagaatgagtaaattaagagataattgcagaaggattctcctcaatcctcatatatggcaatctcccrtgaacatgtaaaccatgatttgatttactctgcccgaatcacttctcaaatawctttttaggaacatacctctatgtaaaggcataaagtaaagaacagctgtgatgttgagtgccctcctgcgtgccatgctcactgccagctttgtctaaatgtcataagatttgcctcgctcgcatcctgccacctggaattgcctcaaacagcaggattacagatggcaaaactccttcaaggctgagtcttctgggcttttttttttttttttttttaaataccattgtatcaagctaatttaatgccctgaagagcaggcatgtattcagtgaggggcatgatggcatgatgactatctggctgtggatccagtctctgttagaacgtcaacaacaaagaattgaatctcaaatggaagaaaatacattttatttacctacacttataaatatgtcataataactctgaaatgttttatatgaagcaccactcccctgttgcccattaaatggggtcatgttatgatgacaagaaagtagtggatttatagccgaggaatatgaattttagagaaaggaatgattttgtctattttaacgtcactaaggctagctcatccctttttatttaccatgcagtagacattttagaattttggaacttattcacatatagaattcctttggaattttcattcacaattttagatccttcttaatcaatagaggcttcggtattgagatagaaaatgcttgtaatttagatgcctacacgtttacttttgtaagacctccccactgcatctgggaagaaggcagaagaatccaaatttaattcctttaagagcgaagctctagttttcctttgcataagcagccgctactcatggtttatccctaggcaattagtgaatatatcaatttgttttgtctactgtattaaaaatcctcgtatatttatgtgactgtgaagaattactgagtttatctcacagatgtgagctcctaataaccataattgtaaaggtatttagttacagctcccacaaagaattcaggaattcttgtgaaattttattttaatagtaaacttcctgattgtgggatatttgyttattataccttgtttctacaacctgtaaagaatcatatcttggaaacgagtactgatcataatttaagtaatctacgtaagattcatataacctcaaggatgcttctgaagaaaatgttggctcttatgtttcaatgcttatgaaatatttgtattttctttgttaatcctcccattattctgtattgtaataattagtttactgtctgagttcttgaggttaaaggcaaacagaaaattcattggtttgacattttctgtatatttttacatgaatttcagtactatattgaacagctatgtttaaggataatcaaaagatgactgtgacagggagaatttggaaatattagcccaagtctagtcaattgtgattgttgttgcgttggtactagtttaaattggggctaaatttagagccactgggactgagtacctcggttgatctccaatgattccaattgctaaaaagtaaagggcaaccacacatacgtaccaattctgaagtcctaggaaatttttaaaagaatgtaagagaataagaaaatgtaaaagggagaagagtttatatgtcatgacgtaagttttagagttatttactttgtaactggaccttctctgcttcttccaatgtgttcattaagaccctgctgaaaaatgaccttccaactcccctgagtaattatttaagaccctttcatcttaccaaccctcaagctccagtgctggagtgagcagaaccattgaaccaacagctggcatgacttataaaagtagtctacagaataaccctaaggcattagaaacctgactccacagattgcacaatctattccacctgattattttcccaactagaatatgcctgtattagagaacatggaccctgctgcatccgtctttatttcctcactcaactacctgtgtgccagtgtacaagtatttgcacaaagtgaattgttggtaaatgtttgatacctatagtgtttctggaagccaggaatgcagtgagttccattgccaatctgtggagtttgggagaattctttttaactatgtattcaatgatgtagaactctcctcattccttttcccttttttatcctatcctgattccctggataaaataccacaactgtcccaaacccttactccagcctgtttaaactgcatttactgtttctattattcacatgcttatggaaattttaggcatcgcttcgtgtgacccttcatgtggccagcctctcctgaggtgatattgggtgttcttccccaagctgcataagcattcatttctttactgagtccttcctttatgctttgtggcacttccaggctggttgtctcatagttttcaggcttagtaaaacttctgcccagggaaggaatgactgttgtgggtttggcaatagagagcagactgagatcctcctgtacagcaggggaagccagtaggtcagagctaatgctcttatttctatatcattactttgatctcgtgattcctagccaacaagcctttctgtcccaggataagaaaggtcatgccaacatcaaaaacaaaagagattactccatcctaagctttaactcccacagaagagtaaatgtatacatctacaaagtcagtgggttttttcctagactttgccagcccattagatttatccaaatgtgtaccatagcaatattataaagtgaaacatcagttamtaagaacatgctcataaatgacaaatattagaatgcagtctctatttgtggtttagatcaaaaaattatttttatttatcctagctttacgtgcatctyacggaaacaggatacacggtgtatatattattatgcagttcgttggaactagaatttcaaaaaattttaataaatatgtttaatctgttgcctctggagaatattgagaattaatagttgtgtttccacccactcgtttcaacggagtttcatatattgaaggctgtattctctgttgaaagctctatttcaccatggatttttctcagcagagactcaggtgtttaatccttgacaccatcactgacatttggacaaatcatgtaaatgctctatacacataaaggggaattaaagatgtctgccaatgtccctacattaaagtactattttaaaattaagataattgtaaatatattaaaagcaagtggaatagttcacacagtttccaacttatggatgggtggtgttctgagagtgtgtgttggtcgttaagatctctggatgcatttttcctgaggaacacaatgagtacacaatgatgtggttcctgggcctaccttcaacacacatgttttatatatacaacacaacacacatgttttatatatacaacacaacacacatgttttatatgtataacacagcacacatgttgttgaataattatttatctaaaaactttagaaactattgttttcatacattgkagattagctgagttatatcagcatgtgatgaatcttcccagcatgtgaaacaaaactgttgctccattggttaaggaaataaatatcttaatgatatttcttagagcagagcacatctccacttgggtttcactttctgaaatacaaaatgaagaggctaatcagtccatctctgaggttaatattctatgtattgtctcataatctttttagtgatttttttaccttcatctatatccccatggtatgattttttatcacctgtttcccattactgtaagctttcctcctttcctaccatctttctttttcttcacattcataattttgaggcacagtttcactgtcactcaggctggacagcaatggtgtgatcatagctcactgcagcctcaaactctttggctcaagcaattctcccacctcagccccctgagtggctaagactacagacatgtgacaccatgccttcccccctccccccgtagagataaggtcttgctatgttgccaagctgtttgtttgtttgtttgtttgtttgtttttgagacggaatttgctcttgttgcccaggctggagtgcagtggcatgatctcggctcactgcaacctctgcctcccgggttcaagtgatgctcctgcctcagcctcccgagtagctgggattacaggcatgcaccaccacacctggctatttttgtgttttttgtagagacagggtttctccatgttggtcaggctggtctcaaactcccaacctcaggtgatccactgcttcccaaagtgctgggattactggtgtgagccaccacacccagccgctggttttgaactcttgggctcaagcagtcctcccacctcagctcccaaagtgctgggattatagacatgagccaccatacttggcctttcttcttctttctgttaacttggtttagtttttattctgatgatcatccctcaatgtctttcactgtggattccaataataattgctctccattaaaaataaatacagacataataatacattgaatgagtagattagaccttttcacatatctaacttaaaggtaaataaattatgtattcattggaagctagcctttcaccataagaagtttaatattcagattattaataaytatggttaatattgatagaatgcagaacctcatgctaagacttttacatgaatttcctcatttattattcataagaacaatataaaatagctcttaatataattcccattttacagatgaagaacttgatgaatgatgtggatagtaaagttagaaagtgcaaattaaattcatagtaagtcaatacgatattattttgtagtttggttttttttwaaacttttaagcaacatagcagcacaattaagcatttaagcagtcgactccagacagaggtgggtttgccttatagatttctcacttgttacatgctagccttggaaagttttctacctctctgggcctcattttctcattatagaagatagagataataataactaatccgagaatgtagtgaggagtcaggaatgtaaaccaattgtgaatactatatgcaatgcacttagcgtgacgccggtacattgcacatattcaacgaataaataatcattatagttattcttattagccatatctaattggctgatctttgctcaaattaatttatctttgatatgaacctttatgtgtgaaggtttaaaacgtgcaggtgtcaaaaaaatccccttaagctgttgtttcaatgataatttctgttttgtgtccattatcaaattctagtatctcagcctactttaataaagtaagacaaggagcatatttccacaaaggtatgtaggtcaaacgttgcctgttttgttttgttttggtaagtaagaaaatgggaataccagtagagtggaactccctcatttggcaatgactgaaatgtgaacgttcagattggttggtcttaccactccatcccatgtgctccagttccagggaaacctcggcttgtgattaaccacactcagatgaatactgctcttattcagtggcacyctccggtggacacatttggacctcttcagggctaccgtctaaaatttggccgcaaggatatggagccacttactactcttgagttctctgaaaaagaagatcactttacmgctacagacrtccacaagggagcatcatacgtcttcaggctctcagccagaaacaaagtgggctttggggaggagatggtgaaggagatttccattccagaagaagtaccaactggattccctcaaaaccttcactcagaaggcaccacttcaacctccgtccagttatcttggcaascacctgtcctggcagagagaaatggcattatcaccaagtatacccttctttatagggatatcaacatyccccttctcccgatggagcagcttattgttccagctgacaccactatgacactcactggcttaaaaccagataccacatacgatgtaaaagtangtgctcatacgagcaaagggcccgggccatatagtcccagtgtccagttcaggacactgcctgtggatcaaggtaggatttgtctgcttacggccttcctcctttaaaggattgtcagtctttggaaatcagtattttgaagctataataactgatcagcccattcatattaataggttcagcaaaaacaaaaaggtaaagtatgtaaaacttactacgtcttggatgccttagatttcagttatagaatgtcaagcaagtctggctgacagcaccccaatgtcctcaggtaaggaaaacacaatagagttggctgaattggagagaaaggaaagatctctgtgagaatggggtattaaaatgaatgctctaaacaggtaggaaaatcatacttctctstctgatcaaagtagacagcatctagcataagcccctatggtccatggtggaaaggacaggtcatctgttttaagaatagtttaaatacactgtttttccttttccagcagtgtttgcaaaaaattttcatgtcaaagcagtaatgaagacttccgtgttgctgtcttgggagattccagagaattataactccgccatgcctttcaaagtaagttgttttctaatttgtaagaratcacagrtaaaagtagaggggacagtttatctgggtaagttatttgcacagcaagcagacyactttgttttggccacgtgtccttgctattttcatttgtgactttcacatgggagacagtttggtgctttgtaagtgtgtcctttacactctgaagaaggagcaggagcttaaatccagggctggcatcacttgtaggttacctactactttgaacttgaactttttacatctaagctagtgcttttgtttttcagccagagaatgaaatttacatggtttctacctatttatattataataccctgggagtttctgaatttgtttgttggcctgtattcttggcacattttaaactctggcttgccattaagagatgttagcaagtacatatttatgaaataagaaatagagaaacatttttgaaagtaaaagtatatttagaaagaggaaccaaaacctttagaaaataggcaatattcataatacgttgaaacgtagagcttttctgcacatattccattaagatcacatacaactganwggtctaatattgwtaagttattttcwatrtatmtatatatagatatatatgtatatatctatctttgtgtatttttgatagacttggaaacattttatcattacacagtaggaaatgacaggaaaattgatgtgatctccagaattatgactactcatggacttagaaatcacctaaaattagaattgactatatatacattttccaaaagctagtgcacattggtttagaaaatatattttgcctctctgataaccagattttttttttattggttttatctctttagattctttatgatgatgggaaaatggtagaagaagtggatggccgagccacacagaagttaattgtcaacctgaagcctgagaaatcatattcatttgtgctgacaaatcgtggaaacagtgctggtgggctgcagcacmgggtcacggcaaagactgcaccagatgtattacgtaccaagcctgccttyattgggaagaccaacttggatggcatgattactgtgcaactgcctgaagtacctgcaaatgagaatataaagtaagttgattgaaggcttagggctgaaggaaagaattataggtaaataggaacattatatctcaaaattayagaggtcrtaaaagaagatactgcttaatgtagtgaaagattcttctgctcagactcccagttttgctatccgagttcttttacaacgtgtcctagtattcattgtaacacagattttcattaatttaacagtgagtttttaatctgtattgcagggacagtgttatttaggagaaacagaaaaacatatagaacatggttcttactacaaagctttttgtttgtttgtttgtttgtttgtttttgtttttgtttttgttttgagacggagtctcgccctgtcacccaggctggagtgcagtggcgcgatctcggctcactgcaacctccacctcccgggttcaagagattcccttgcctcagcgtcacaagtagctgggattgcctcagcctcctgagtagctgggattacaggcacctgtcgccatgtctggctaattttttgtatttttagtagagaccgggtttcaccgtgttagcctggatggtctcaatctcctgaccttgtgatccacctacctcagcctcccaaagtgctaggattataggcatgagccaccgcgcccggctactacaaagcattttatgtcatagtttatggaataaggtgaataggtgattaactctaatatttggcaaaatatttttgtaattatgaagaagtcttacaaagtactaaaaggttgaaaaaaagggggggaaattagataatggtatatgacactgatgtattaaaagtaggaaaaattccaaaaagttaaagttaaaaatgacattggaaaaaatataaacattagaaaattcaagttttctggtttgaatgtagcacagcatagaggccaacaggcctgaagtggaaaattaaatccagtcaattaaataagtttgtccaaggacatatagctagttggttgaataactaatagaagaaaaaagtattttcaccaaaatatatgaactacaagtactgtggtagactccggggaataaaaaaagatggattcctgacttcaaagaccttaccatagagtgagagagatacagagaaacagacagatgtagtaagcgttaatgatagaattatgctttatcttaagagcagctaattcagaatgggtcaataaagtttctgaacttaaatcttaagggataaataggaggcatacaaataataaaagagagactatatgcaaagggagtggtaagtgcataggcccattactaaaggcacccagtggtgccatacggctggatcccagagcgcctggccacaagtggcaagagaaggaagaaggaggcatacaagagccaagggtatacccagaagtgaaaactatatcctctagacaatggcaacccattacagctctttacacaggagagtggcatgataacatttcaataatacataataaaattccattttaggaaatatttgttgagcatctattgtgctacctgtttggaataagaataaatcctttctcatttcttctatctcacaccctcaagtttaggtgaaacttgctatgccaggtttgaaggtcaagcagagaggcatttattcatagttcatgcattgttggaatttggatagatgggagcgccatagagatagtggtagagaaaattattgggaggtggtcacatagttgactctaggcaaataacaagattctaaaggaagatgatgatgatggaagtaggatgcagaggtagacatgagttacactagagtagtagtacagcatacattattggtagctgctttaatgatgagatcaagagagtaaaatatggctctgagttctgagcttggatgacaatgaatgatgstgtcatcctaaaggataaaaaaattcagaagtaaatgagtttaacgttgtgtgtattaatatgaaatatcagtgaaatacctagttagaagtgtgggcttagagaagttattaagattaaagatsgccaggcatggtggctcatgcctgtaatcccagcactttgggaggccgaggcgggcagatcacaaggtcaggagttcgagaccagactgaccaaaatggcaaaaccccgtctctactgaaaatacaacaattagccgggcatggtggcgcatgcctgtaatcccagctactcaggagactgaggckggagaatcgcttgaacctgggaggtggagattacagtgagtcaagattgtgccactgcacttcagcctgagcaacagaggtatactccgtctcaaaaaamaaaacaaaacaaaacagattatagatatgcatttaggagttgttaacaaaatagcaatggtttcgtggaagaagacagaatcattgaagcaatgaggggaaaatgtgaagcaaaagactaaaataaaggtctccgttaataggaagaagagagccagtagaggacacagagagggattattagaaatctaasaggagaactgagccagagcagcatggcaaagggattttctagaaggagaaaaattcaaaaagtggtcaaaaactccccaaactccagaaaacttaaagcagatggctgagaaaatcaggtattaaaaaacaaaatcagaaataagaagttttaaaatagtataatttgtgtaatttaggtataattaataaattcagacctgatacacatcctaaaacaacctttcctgggtamactttcaattattgtttatttgataaaataattgatgaatttcaactaggtgacagaatttcaaaaagattattactaaaatcagtgaaaagaatttctgaaagattattactaaaataaattcagtgaaaagaatttctaaaacattattcccaaaataaattmagtgtaaaataaagtcttcacatttgtctactcttatttttttttttttttttttttttttttgagacggagtctaactctgttgcccaggccggcgtgcagtggcgccatctctgctcactgcaagctccgccttctgggttcaggtcattctcctgcctcagcctctcgagcggctgtgactacaggagcccaccaccacgcctggctaatctttttgtatttttagtagaaatgggatttcaccatgttagccaggttggtctcgatctcctgacctcgtgatccaacccctcagcctcccaaagtgctggggttacaggcgtgagccacggcgcccggcccttcttctattatctagaaatctgaaaatgagaatggagtatttgtgtaatttttatcccaagcaatttcagtatgacagcgggattatattccttgatttgtgtattcattctgaatgtttattaattgatcttgacagataaagsatatttatgaatttttaaaaccactttattgaaatataattgatatgtaagaaactgtgcagatttaatgtatacaactcaatgagtttggggatacgtatttacctataaaaccatcaaggccatagacatatcagttatttcttgatcacataccctaatagtcaacgttaatgtttcagggattcagtakcgacagtgtgtcctttctcattgttctcatacagcatagttaattgggcaatttggacaagcaaagagttcactgaagcagagtcctatartagagaaaattagatagataagggaggctgtagacgaggctcctaactccggcttattagttcagcagtcctagagaaagtgacaaatgaggctttttaagctgaggcttaaaaagtgacaggaagttagctgggccatgggagtgggagtggagagacagccgttcactcagaggatagagcgtctctgatggtgtagaggcaagagaaagactagcaattgttgtttggccacgttgtacttgtctacctcttaagactttcctgctggcatccaacaaatrtatattctatacacactgttttgtcaggactatttctgggaatagaaagatgactgagattaagtcctaccttatagtaagagaatagattcagaaaatagataatgtgaatataatggggtgagtactgccaggtattgtgaaaacataaataycaagttttagcccaatttgggtgtcaggggaggcctcctgaaggagatcatatctaatctgagtctgatagtgtgagaaagatttaagaaaggtgaaaaagttacaaataatgaaggaacagggaaatgatagactataaattcattccattaaaaaaacatgcatgtctcttcaggaaaagagcagttgaaagaggaaaatagtatagtatattcttcagcatttactattaatttagttttcaatactttcttttatttatataaaaatgaccttttagaggctgttcaccaaattgtgttgctagaatgtgttagctattattggaaattggcacttttagtccattggtggtaaactttagtttcattttccaatttctgaaggagttgagaatattgcagaatgttttctacctttgtcagtttttatttttagcttgttcaattttttttgttttatttatgcactttccgcttctatatttgaaaagggagtcagggaaaaggtataaaactttgacatcacagaaatgagaccattacaaagcagaaaaagaaagcaaactattttggacattttttgttttctaggaatgaataaaagattctcagaaatatattacagccactttggggaagaaatgagtgaaagactaaatcaggaaagtacttgagtgagaaaagtatcaaagaaatggaaaatgaaaagcaaatcttgtagtgaaaagccttagatgatttctatttattggaattcttaaagggataatagtgtaaggttactactcctgttttctagaytggttaatgtaacacggtcaggtattacaagaagctccgtgccaygctgtgtcacttgccgtggttggcaagtttagaaattaggaaaggttgtagctttttattcagtattctattagaaaaaatgtgaggaagaaacagaactcattccagaacggtgggcaggttgctaacttttatttagatgaaagctatccagaaaaatgcttcctatttgttttcaagcaaaatgcagttttggtgattgacacctgttttcttgaccaacagaaaccatgctgtcatttctggccaagttaatgaggaggtcttggcccctactccttaactcctcaacaccgaaaaagtgtctaatgatttctaattaatttaatatctctttactttcatacttggttgttgtattttttgtgtgccacatcaggagagttccctcacagaaaggctaaatttcttttgtaacagccttaaggatactgcaagttctggtatcaggaattctgtggtgcttaaacctactatttaagtagatttggggagcagaatgccagtcagatctagcagtgctactgttgttcagaagcaagttgtaatgacatagggaacytctgtgactttatagagcagaattttactctgggtatttaaaaaatgcacaacacagattatactargagaaaaaactaccagaaggtactcaatgtaaattaattttataacaaccgttttatgtttataaaaaattgaaataaagaataagggtattctatgaaattttcaatttctttggtcttactaatttgttctcaactttttcttttaaacaagaagatttttgtggaagcatggcttacagtgttgcttcataagatttgtgttccactattagcagcctaatgaagagtaattaatcatgtgtttgtgagttaaattactttaactcacaaaggcttaaatttgtatagtactttgcaatttactgaggatattaggtttcatttaagactcacaataaccctgtgaggtaggtattcttcctctaatttacatatgagtaaaatgaggaccartggtactaagtgtcctggccaagatcatacagctaatactagtaatrgttaatacgaacagagggcatactaggtgctttgcaaaggatgttacacacattaactgatgtaatcctcacaggaatggtgctcctcattttatagctgaggaacacacaacatacagtgacttgccccagctggcaatacaaaaccagagaggaaaggcttgaatccaggcagtctggctccagagcctatgttctgaaccacagccctgcctctgtgcccataagtttattggtcaaaatagaatttttttttttcctaggtcaattgataactgattaaaactccaaaagaagtagacataaacaggactgccccagacaaaccttagaactaagagtgaccaggcatatgtgcttgggtacagatcacagaagtgtgtgtttagtgtcatgaagcaataaagtcagtgggttgccatgagaatttaaggagcggtaaagccaggaggcttacgcaaggaatgacattcatcattaaactcctagacggacttttcacctcccagttaaataacatgtttgagaatgctaatacacactaacacaaaaagcctgactgaatttgaagtgggactgccacaaaaaccagagcttgccttctcatataattatggggaactgggccccttgatgataacatattaaatgaaatcagtaaaactttacttaatataattaaaactctgaaggttagatttaacttatctaattaaatctaatatactgggaaaacacagcttactttataagtagtcaagggctttccagatatattgattctgaagttatttatttttctattactttaatagttaaagtctatgttgaaaagctgttttgagtctaaactccaggcttgaggcagacgggcaaagcagaatattgagtttaattttacccatatataaagctagctccaaaagcaatttatttttttttttttcatttcaagcaagttctttcagctcatatgatttggttgatatgaatttgtagggcacatattagctgcccatttcactcctccaatatgaatcatcttatctttcttaatgtcctgtgagattagaacaagggtcacgagtaggccagtaaagaaaagaacgtttgcaataaggagttatattttctagaaactctatttgggcatgccattgctggtttgaagaaaggagaaaaagcttgatgagactgagagttgaaaattctgatggagaagaaccgccaaatatttttgactgcctgacttaggagaggcattaattcctaagagccacctcttgtacccactttctttacagtggaagaataattccatgataaaatagcaaagttaagcaaatgttgggggtattatatgtatgtctgctttagtaatgtttttataaatatataaatttgttgtataagaaaatgtatagattaaaaatggttcatagagaccatataatgggggtaataggtttaaaaaaaatcagagaagatttcacttagaaaataatcagttagtagatatttaaggagagagaatagttaactaggtgggagtgacagaaagttctaggcaggtggaacagaatgatcgatagtttaatgacagaatggrctgtcagagatctccaacccctgggccatgaatgggtgccaattcctaaccttgttaggaacccgaccacacagcaggaggtaagcagtggggagggagcattaccactggagcgagctccgcctcctgtcagatcagtggtggcattagaatctctcaggaacatgaaccctattgtgaactgcacatgtgagggatttaggttgccggctctttatgagaatctaatgcctgatgatctgaggtggaacagtttcatctcaaaaccatccccccaatccccaccctgtccgtggaaaaattttcttccataaaatcagtccttggtgccaaaaaggctcggaaccactggactagggtaaatgcaagaaactgaaagcctatcaagctgtagctgagagggcacagtcagagggattcaggcaagatcctgctggccttctgatacctttcagtctttatcctaagagaaatgaggatccattgaaatgttttaaaaagtggaaatggcagaacaaattttgtattgtgaattgaaaatttcagagactgcactagacggggctaaagtcaatagagagagttgagagagtaaggtcacagtctgggcataagacatggaatgaggccagaagagtggcagtagagatggagaaaagcacgtgcactggagatagggtttggaagtgatagaacttagcaatagattaagtatgacagagggagagaataaaggcagattgtcaatgataacacctaggtttctggcttgtgcactgaartggattgtagtgcaatgttagggagggtttattttgaaaggcatattatttcttttattttaaccacagtaaattgggggtacttttgtaacttaaagtcagataaaccagtggaattcagaagaacattcttggctaaagatatgagtctggaaatcatttgcrtatagctaagaactgatgccctgaggtggaatgagatctaggatgaaaatagggtctggatagaagttcttggccagagccttgaggagtgtcaccattgtagctgggccgcagatgataaattctgctaaggaaataaggttagtgtggaaggagatatacatagaaataacagaagaatatcacagagaaagggctcagaatgtttcatggagagtgttaacatcttaaaaggtctgctaagagggcaagaaggacagaagagtaccagaaactccccttttgatgtaatgccctggagatcactgagcaccctggcaatggcagtgaggtggagtgaggaggcaggcgctaaagcctagtcagctgggaagtgaagggaaagggaggcagtgggagcagcaggaacacacagctatttgcagaattttggcagtcaggagtgggagaaagagaggtgactagagtgggatgtggtttgttttgttctctatatgacacatatttgtacatggttgaaacctaagtgatgggatcaaatggggaaggagaagttgagatatatgagagagaaggagtacaatgtatggtaaacttcctaagaaagtgagaagattgaaaacaattcaagaaatagttaatggccttcaaaagtagggccagcccttctactttaccaaaagaaaatrtgtggtttgtttacagatctagatagacttgtactttggtagacagatsatgagggaattcttgtctgaatctttgcattttctctttatataagagatgaggccatcttctagtggggtggtttgaacgtccagggtttcaggctagaggagaaagtgaaaatgttactgtggaaaatggaaggactaggcaattggagcagttattaggaaactagatagtggtaagattgccaggccgtgttgaaggcctaactggggttgctgattatgaatttatggcattattctgccctgtgctttatttctcaagctgtgttcagctccctggattctggcacagagaatggcaagcgtagatttcagctaaggtagagtggaggagacgggctttggaaagggagaattgaagaatctgagagcttcagtggtacgtgggcccgacctatgaaggttgaaatcacccaggatgatgacagagtttggagaaaaaagaaggccmtgaaccccgcaaaagaatcttccctgagagaaaggagatgctgggggaggtactagatggcaaaaatcagccagagaagatcwtawtrtagctggattgcatgaacttcaaaaaagaaggggtttgttactacaraagcaagagagtggaagaaaaatacctgcaggaagcgatgggaagccaggaaagaaaccccaaaccctgactctgaggttcatgggcaggggaggagggatagatccacagctgccatatgagaaggctgcaaaggaagcagtaccctcaggggagagacaggttgcgggtaaggcaaggaagttgatatttacaaagctatagttgcagagagcacagttgaaatgtgtggatttagactgaggtgaggctttgtatgatacagaatttcaaattgccactgccctatttctttcaatgtgcaagagctgctttgaagcaagcttcactttgactgccctagatgaatgctttagagatcagcggagaaaaaaggttgtggatatcttgccgcaccgttaattaattgccgtgggggaggctgttcaattcttatcccagccacaagtaaaatgaatagtgggggagtgctgccgaagaaagaatggattttttttttcatgtacaagaatggcaactcaaagtatgaaagcagaagaaaaaattaatgaaactcatcagcttaaccttgatttacaagattctgaaggaggacaatggtagcactctgataatatgcagtatcattgctttatgtgtagcgctcttctgactttgagaagttggtagtgaaaagcaagaggttccttgacaagtgtgtttatcaagcacatctgcagtgtgattttgtacgctcagttgcagcctctgtcattctcctccatgctcatttaacatgatggacttgttcggtaaatccttcagatggtgggaggacaggagagggggaagcttactctggatcataacataaaagatattggtctctgtcatacrcagagaagcctctgccttctcctcatcctccttgatcattatgattgtttgtagtaaagaaaatgaatggctagctggtrtaatcctgtgtatctgttgattagttgctcagggcaccatggagaaagcattgtggtatarttgtctggtttgagttgaattctccattaggggaaaagaagtttgacaagctctttaacctgcagctcacggaatttcatgcagtcttactgaataagatagttcagatgcgtctctccgrcytgtgatgttcatactagccagtagcagctggtatctgtttactgctacatgccacacacactgtgctgagcacctctggtttatttccccccatatcacagcctggtattttttactcacgtatttcagaatatataacagattctggggtctaagccaaagatcagcccaaactcccagccagacatatctccaagtgccatattcttcaccagaatgctctagagcagtgccgtccagcaaatataatgaaagtcacatgtgacattttaagttttctagtagcaacagtgaaaaaataaaaagcaggtgaaattaattttaataatttattttatttaacctaatacatccagattattttataatgtatcattattttaaaaattattactgagatatttcacactctttttaatgctaagtctttgaaatgcaatatgtcttttacatttacagtgcgtcccagtttgggctagtgacattggcagtgcccgatggcccccaggggctagtggataccatgctgaacagctctgctctagactcttaatggaaacagagttcttaatcacagagagtttactgagtttattacaggttttgctttgagatgaatagaaagaggccttgctggcctctgtggtctctgtgattggtctctgtgattcagtgtgacacagggttgggagtgtccttcctcttgtttctttgtcctgtgtggtggcctcctcttttaaaggtatgggggtatgtttaggtccgtgtgtgtgtgttttcattttcacagtaaatctccacgaagtgtatggagtccttagaaaatactttatgacacatagagtaaataagaaaaagagacagaccactgccaccattaagataaatgtagctttgcgtcccattactatctgttttaatttggcaattatttaatctctacagatctgtctttttgcctgtgaccagtccttgtagccttataggctatacctaggctttgctcagagaatttctctgtaggaggacaaaaccagattatgcatttactataatacctgagaagtaggaagtgattaatatgttattattawacagtatgttcaaagtccttgtatagttactactaaagatcagtatgagcagaatccctaaacaggaatatgaaagcagagtatatactagactgaagtgacaaaacagctttacaaataacccatacctatttgtggatgggtgcctttatacattccttaaattttagttgactgttctcagtgtaagtattcagttacttttgtcttttcgtatagatgtcattatagtgatagctrttttgaaggcccttaagtcgtgattttctccaattttctgcggtacttacctcgagatttgcaatttgatgggtagaaaaagaagggaatttttaatatcttactctgtgcaattatacctaatttttgttacttaaaaatttttaattcaaataaaaagcattttaggtttgtataaacaacaghactactaggtatttatgtgggctargagtgaaatttttcatmtayatcctccttttaaaaacatcttcttataaattcatgtcatagaaaatatttggttcagcagcttgtggtggtagattgcagtattctagccttgtatgtgtccagcaccagggccctaacaaactatgcctgctctgtttatgatacctaataaagagcagtccaccatgatgatattaccatacaagatcantgcaatcacacataaatgtcttcccgtgttgtttttaaaattgaacaaacaggtggatatttgtcattgatgtaagaaatggacaagtcaccccatatccataatttgccttcaacctcattggtctgtggaaggtttaagggtatatccacgttttcctcctttcaactaacctaacttttatctattcattcttgtgcagaggttactacataataattgtgcctttgaagaaatctcgcgggaaatttatcaagccatgggagagtccagatgaaatggaattagatgaggtaactgtgtcattgttggcnatgtcttttattcgttatttaatctgctgcatttccgccccctcccttggaggcctttcaggatctaatctgggtgctggcttctccatacctagctggttggatggttcagtgctatgggcatgctaacccctggggatcccaacaaagatcctttggctttaattaaaaaacattaagctgcaataaagcttacaacctgtctaatctttgttggccttaayattttgccccttgctccttgtaaaacatgatgtagaggtgtggaaggtgaagtgaattgtcagcaaagacttaatcaccattggtataaatcccaaggtccccttcattagtgcaacagttgctgaggctgtcacaaacaccaagttgcaatttgcagcagagttcatttgacctacgatatggtcttaaccagtttctcacagaattctgttgattatcagatgtttgccttgttctatattctgtaggttttcagagtcaaaaatgcatttaactatagagaaaacaaatgacaaaattgtgagcaaagcagaatatatagaataagaaacaacaaatactaaatatataacgtggatttccaaaatcttgcaacagcaggtgcattataattggtactcttcttgtataaggacatttttgaaaggtaatgcataacatgaagaacaagacataattactacatacttctatttagryaagaaaatatgatccagaagtgttgagctagatccccagaggaccacagcaagttaatgagtagaattcacattttaaaatacagaagagcctttgttattttaacatgatgctgttttcaatcagttcataaggcaaataaccgtaacgcccccatttggcaaatatgagattttaatttattgggattatttatagcataggccacatcttgtagtacaatcttttatttctaggtatttcttctacctcaaattagtacaaacagagcaaggaaaagaataaattccctacctacattacagagagatgatgcttatttcatatctatgtctgcmcaaaggagactgtgatctgaccagaaaggttgttagctttctttggcagaygtgtgtcatctctagaagcgggatttatgatcactggcttcatttatctgaattaaatttgatcgtgttcagacgaggagatgagttcaaggttaggcctatgcttttgtgtcactagtgattagatgatcattggagctgtgtaaaatragacattatttcaataatgtcatcaagtaatttagatatgttataatttaattgttttgttttgatggtgaaggaacaaaatcattattctgtgatattcagaaaatagtaatcctttaactgaaaatgcagaatgatcagctgctcttttctaagcattttgaagccaaacatgattttacttgcaactgactaatcaattaatcttgatatattctttactattttaattggttctcagctgaactacagaagtgtcatcatcctgtttaagttgaaatggaatttaaaatgcaaaggcaacttgtagaatctatgaattgttctacctattaaaaaaaagtttttaaggcactgagatccaagccagaatgacatcaaatagttttaamtaataagctttccttagaagtaaagccgtttggtagtaagtaatagaaagtgattctcttttgtagccaggttttaacctccaaaatgcacagcaacactaatggattaaagtatagggctatatgactttgaactttcttgcaattaaattctgtgggtctccgctgctgattcccataacaaagggtcattttaatcatccaagttgtggtgcattaatctgtataatggtttgataaagaacattttattaattcaaaatttttgggtcgggatgggttgtttcccacttttcttactgatataattgagaccacattgtagaattaatggtggaagaaataagatatgcattgactggaaaatgaaaattatttctgataaagaactaaagcccttgatatatcttctggaattacctccagtacatcttgtaaccattgtggaggggaacaaatgaaagtaggctatggcctcactttatgcttactcatccagtttttgatccctacagagagtttttttttttttttttttctaccatggataataaaarcactgtagtaattttatctatagcttgatactgccaggtttgacaaagcagtgttcctctcttaaatgtatttgatcaagtaatttttcagaaaggcctataattcaaattgttggaaccatatcattgaatagaatggtggcctarggggatttccacacgtatacctcatatctaggcccataaraaattgaaagaggctttccaaacagyattactctcaaaattatcttctgagttcatttatcctttgttaccgggctgctctccacatgatacatttataaactgaaactcctattgtcaaggtcaaactgggtagagcagacattgatagtcaaaatgaatttggggcagaatgactcccagaatgttagtgatatttaattcagagcaggtcatgtaatagatcatgagcttttcactgcattgtacttcaaaggcttgttgtaaaataatgtggtcatttgtggttgtaactgcaacatgctggctgactttggtgtcatctgagcccatttgaaccatttaacgtgtaacacaggaagcatcctgcagagattagagcaacctaaaggggcagagtgatgctccaggtttgactttaatgaatgactgcattgggtctaagaatacccaaaagctcaaatattttattgtgaattacttcctataagtcttctaaagaaaccctagcagaaagtgcttgtgggaatgacaatgatatggatgaattgcgactattaactacatctgcagtatgaataaaaccaaggtagggtttgatcagtgaagtagaagaggggacacagtcacataaacaactcatgatgaatgtttttgattacccagcttcaaaaactgttcagcacctctgcagtgcattttccttcttggtgtaataggctactgtccttaactacayatcaacaataagctgtgtaatgatgcttcaattataatacttcattaaatatttggtatcggattttttttaattagcatatgaaaagaatcaagaaaaaagaaataatacattcatctgccttgatgtaagcagatacataaaaattatatgtataaatacacagagttagaacaatttagagtatcagagcttaaacattatatttccttatgatattgtgtaatcattaagtaaattacattatagttgaaaaaatctctaacatggaatttcattttatttcagtaattgagtctaattatatattgagactttcttctattgtgcctcagtttcctcatttataaaatgaggataatattagccatccttatagggttattacgaggagtaaattggagctaatgcatgtttaggatccctagaacagtgtctggcactcagtaattgcttaataaatgaaaactattattgttataattatcagtattataagtaaagctaaatttgacaacaagattaaaagatagtgctacctttctggccttgtgtttttactggccaattggtgcataattgatcagcataactgaatttattatgggatggtccaattttgctaaacaagtgatgcscaatctaccgtggttttcctaaaacagcttacatttcatgtaattttaattgcatcaataaacttaaattcacagaaaattttagcacgttataaattaaatattattgaaaaataatgtcggccaaaattttcctgtaactgaaaaactggttttttacatttttaggatacaattttgaaccagctgaacacatttactactcccagtgtagragggactgtaacgtacgatcaaattcctaatggaagaattcagtgtttatcatatatacagtctgaagccattttatcacagaagcctagccttgatcatgccaggctctcattctactaagtagagatcacactttggttcttactagatcatttctatttacaaaaacagggctagtaaatagttttgctgcactgtttccataagtatcttaattttgtttatcaaggtgaagacaaggttcattcctttttccagtttgtcctcaaatacatagacttttctattaatacatagatattaaaataaataaaataaaaattcttcccaagaaaatggcgaaaagactgctgcttacatcaacaggcatcccagactaatacagacctttcccttgttaaaccctgtgaaataccaattttaattggagaagtcaaaggtaactttgaaatcagtgttcataaccactgttagtatgattttctcgtaatgaaggagtcaatgaaaaataataggttatccagaaataaaytctatctcttttctttagaaatacatgaagcatctgtatatacatgtgcatgtgtgttttcttcagggcagtactmaaattaattttcatctaccttgcctatattatctggcaatatatacacactcccaagagaggtcaattctagaaaaagttgactccatgataaagtgtaaggaagtgcaccctaattgcctaaccagggagctaagtcaagtcagaaattggtaaatgagtaacaatgtctatttaatatgtgtatattaaaaattgtttattggattctgcttctgctgatttgagggaatttgtatcatatgagttatctcattactmaaaacaatctaaagtggcactaacctcttctaaaatgtggctatatttaaagatttagatggctttgtctgaggttaatacttatttaataaatctcctgcaggrcaaggcttttatgaatcaagctgacttttttccttagacaagttatgatgcactttgagagaatttcattagtgtaggaaatgaaatgagctacagcaaaggacctcattgccctgtgtttatagcctagaccttgtcagagcagtccagtatcttacctctaccttaacaggaagagaagcatttgaaatattgagagaactgagatttagtgatgctgatgtgctatatgaaatgtgaacaaattgcatttgggttgttcccagttctgaattaatttatctcattaaattatcaataagctgggttattatttacagttctttttctgtttcccacttttttccttaagctgcttaaggagatatctaggaagcgcagaagcatccgttatgggagagaagttgaattaaagccatatattgccgcycactttgatgtccttcccactgagttcaccctgggggatgacaagcattatggtggatttacaaacaagcaactccaaagtggtcaagaatatgtcttctttgtgttagcagtaatggaacatgcagagtctgtaagttaattatgatggcatctgtttcctatggtacgcttatacattttcactggaatgtggttatttggggatttgtgggtatatccatcctcattatttctcatgaactgttattaagtgtaataacaggctgcctactctttgaacattgctcaatatactccttgagactgcattacaaatgagactatgtctctgatgaaggaaatttaggtggccctctagtttatgaagttccagatcgataggacatggttcttgataccttctgatgtaacacaaatatcatggtgttagaaccatcattgcttacaatctccttccatcatcctttcaaaatgactgttgtccaaaaaaggagactgttgcataatacctggttgacattagcccctgtgattgcaatgggaactcacaagcttggccattcaacatggcatatttctgaaaatactgactttgggggtgattgtatttattctcctatatctgccaagtgagaccacagtgcctctacccggattcatgaggaaggtctatctagaaagaggcaaatacagcagcctctttaattgtagaaatttatgagtgactgtatcagtgaaaagccaagaaagttagaaaataatttaataaaagagagaattcctaaggtattctaaataatgagttttcttcttttatgtaatccatcttgcttatatgtcattttatgcttcagttactttgaatgtttaaaaaaaaaaaaggggagagatattgtagataggcagggggtgaattttgaagtggcagtacacatgaacatttaatatacatattataaacttcgttttctaatcggtgtctaaatatgacaggtgtggcaacccagttgagccagtcatttcccatatagaagcagctcacaatgtatcaaagatttctccacatcaggtgttagtgtgtacagtggggcctctcttcaagtgactgaaagaattcccccgtggaaaatcaaaacacaaaggcagcctctctgcctggtttacctttgtgctcagaatgtcatttgaaaacaaagtaatggccttcctggaattttaatgttcagatatgctttctctttctagttgaaggttttaaggcagaacatcaagggaatggaatgttaagaaatcatctttttcttttattcaaaaatgacttttaaatatttgagaggaaatttcttttaatagctctaggaacatttcaaaaagcatacttagagcattgaggtagatcagagaatctagcaaagaagagaaatctcattcgatcctgcagactgaaccactgaactacacactgtggtttctgatgtcttccgctagtgttttaaatgtgtcacaactgataaagagtctgcccctttctttagtatgtcatctgtttattaattacagaatcaagaattttttccaaatttgttaatgaagttgcccctttattctatcatctttctcagcattgctttcaaatatatatgatatttattttctttatatatcataaatattttcaggcctaggagagacttgtatccagctagagtcattttgcagtaataaagcctttgtgtaagcctcaaatttccatatcagtttataacaatgttccaagggtagactggtaatttgcaaagagaaaatacttctccgtccctctcaaagacacaagctatcccctaatcctttstctcatattaagaatgtcagataactggtttggaattatccaaaatttaatctcttattgccacgcacaagaaattatatttttcattaggctggtatcattttatgattttgttttcttttcattttcatatgtctctgtttcttgaatgggttggaaatctatgttctttgggaaaacctgtgcttagacttccatctcaatggaccgtgattattatcttaaaggttcttggtaaagaatttcaaatgagacagtattgcctagttctgtctatgaaactgttttaacatcacctacaaaatggagtgggtaaagcataaaccaaaacaattatataaaaaatcatgtttcttagatatayagttctttgccaagtcctttgtgtcaatcctcataccatacacatcttttttttttttttttttttttttttggctgcctctgagaagcttggacatatatactgagtttttatcttcttgtaatgcgttagaaaatctgcaaatctagtcagtctctttcctgggcacaatgacgaaaatgagagagaagagtagtatacaagcattcagtggaacatctgttctcctgcttgatggccaagctcattgtacttaaattcagaatagatgccataaactaaattttttaaagatgcaggttaaaacatttaaatatatgtaccaatcatgaaaagtgagcatatatactgatgtcttgacaatttcagccatttgaaaagatgaacattttttgtcttattcagccaagatttgctgagaacccactaagtacaaggttcattgctagctgctttaagcatataaacacaaataatatataaatccctaccttctaggagtctgtagtttcgccaaagaaaatgaagtatatatacaaataaaaagccaaaatacagtttggtgagtaccatttaaaaaaacaaggactaaataaaaatttagctgtgttatttttatcttttttggtttttttagtagaggggaatgaccgatcactgccagtcaattaaaaagaggtggtttcattggaggcagtattcaagtgggggcctggagagttgttcaatttcaggagctaaatgttgtggaacttgtgagggagttgaggaacaagaatagagcctttagggagtagtagcaagaagcccactgtgatggaatgtgttgtgtgtcgtaagcaagtttaaagtaaaattgtggatgcccttgagaaccatgctaagttatctacgttttatttgggaatcaagagagagcctcttgaaggctttatagttgcagtttaggatgatacctctagcagcagtggagactatgagaggaaggaagaagctcttggtatagttaggagcacataagtaagggcctaaagaaaagtggcactcatgagactagaagaagagcagatggacctgggggacactgattagctaatatcagtgtttccattctattccttttttctgtaaggtaaaatcagtatccattcttagatactgagaggatgagagaatttgggaagtgaggaggaagggaagaaggatctgggaaaaattaagaaactcatactaatttgaacatatatgtaggggtctctagaaatgattggaaatgaagatctgggatttcatagagtatctgagtttaggaacattaatgaagagacagattctgcatggaggttgatasttaaagcttgggctgaccttgccagataagagaggacaagagatgctagtagagaatagaacttaagaatacgggttcagggccagccacagtggctcatacctataatctcagaactttgggaggccaaggctggaggattgtttgagaccaggagttcgagaccagcctgggaaacatggtgagaccccatctctataaaaaaaatttttttaaaaaaagaatgtttgtctataggatggagtcagagataattaactcagcagggcatgagcagttggaaagatgaggatgggactggtttaattcaaaattragagagccagagataaaagttttaaagaaggcaaatctggaaaaattgtctagaaaggtaaagagtaaataaaggcaattagatttggcaaatgaaaaaaaaaaaaataggaccaatggtggtttggagtgagaagagatgaggagtgagtggtagaagcagggcagttagtggatatggattagtttctgttggattggaaagtggaagatagggccttgaagggggcaggtagagccaagaagatgttttcctaatataggctaaaataggacagaactaaatgggatcggatatcatagaaataaaaatcatcgatatttagtccatttcttctccaagtaactgtattcttaaaaagtatattatcagttgtctattgagaacaaacataccaatctctgagcaataactgtaataaaactaagtgagaactgctgaattcttttaagttctaaaaattctatattttataaagccatatcatcaattctgtacatctcgcatctgtaatttgaactgtggaattctcttttgaaattgtagactttatttgttcatgctttggcctccatttcctaactaatatgcagtagtattaagtagtaccaagcactaagaagcacagtagtactaatgactaccgatattcacatttaattaaatactgacttattttgcattgtaaatatgtmctttggtctccttaactgtatgataatggcttgagggctagaactctagtttttctcttgattttcacacagcacctaacgccttggcacaatgtaaatgttcattaaacattttgcaactggttaattactggtactttacgcttcataggatcatttaatacaccatatagaaagcccaataaaaagtgtctatgaagtaatttgtactatcaaaatgattttattataaaatagttcactctataaggaaatttgtattacaaaacatcttccatcctttcttttctttattctcctctcccctcccctctgttttgctaatattscatcacacacttatcattaaatccactatttcctggattttttgcttcttctaatgttaaaggtacttatctagaaagtcattattttataactgaaayagactctgcttttcctcagaagatgtatgcaaccagcccttactccgaccccgtggtgtcaatggatctggatccgcagccaatcacggatgaagaagaaggcttgatctgggttgtaggtcctgtccttgcagtggtctttatcatctgcattgtcattgctattcttctttataaaaggtaggtttgcccaatatttctgttgtaattttggaggctgccttatttttgaagacttgatcattgttctgctgtccttaggtggttgattttagtagaaatacttcagtgccatttcaattatttttggaaaagtgtttacattacagtaagatcaaaatgtaaagactgtactatttggaatcttattcagttttggtatagacttctgttgtccaacatgcatctattcyggcctccaatcttctgagctgctttatgcagataagcacttttcataacaattgaggcattagtgcattcacaagcaaataattccatgcaagctttcatttgattgttttagataattaattgctcgatttcagtgtgttttttgaaacactatcacgattttgcaatttgtatacatatcataattctaatttgcgcaagtgttgagatagctccctgtagctatttctcaaaatttagcaaaagcagataaaaattaaggattaaggaaggggaaaaaaaagagaaggatggagaatgaatcgtctcccaattttcttctaactcttattccacatctgcactggtgaattcgtgtatgtgtccaaaaagggatgccaaggtactattttccttttttaaaaaatataatctcagtcttattatgcccatgtgttgatttgagtagtgtctttgactacagttaggatgcaaataatctgtgtctacccacatttttctgatatgccactctttttcaattttatttctgcctctaacatctaatctctaataagattttttcccctagggcactggccagtcagttagatagaggacattagtaattgttcttataaattctttctgtcttaagaatataattataatataaatatgaacttataaagagtagcatataatatactttcttaaacatttaaaatgactaaattcaaaattacttccctttatatagatttttatttttttccaatccaaattgtattttcacaaaactttaatccatgttctcgttttccttgtggtgtgttatattttgaaatgctactgtgaagttgatctcatccttctactacaagatagcttctctccctgtccctaaccttggccttcagaatctaaaaagagtatcttcattttgattcttgcttacatgcttaatctaataatctcatttccattcactctttttcctacccatctagctcccttttggggggtttatattaattattttcaccctcactcccttgctcttctgtccctggaataacgtttttcccccataacctcttatcttgactcttaaaaaaagaaactccttcaaaactcttctcttttgaaaaacttgtttttaaaaggctccatttcattttattccagcattaagagagggttgagaaaataaaggacaaatgaaagaagttcataaccataacccattaaattgcctatcctattttagagttataaagaatgaaagatatatccatcattattttttttcatgaacactgccatcattcaattatccgtgctgtaaaatagctgaaaaagtaagtgtggaaagccaaaatctcctctcatttgatgatttgaatcttccattccaatctgtatctataagcatgtatcttaaggaacccattgtattttattacctctctccatgtaagagataagggcaggaagcatgaggtacacacctgccccgtgagtaatcatagaccctgtttgagtccaagcaggagctggtgtcctttgctgtctgtacgctgcacttttttccagaagagaattcaataataaaaagcagtggtataattctaattgttttctgggaaatattgatttaggtagtcacatactactatgggagtaggtcaaaaaacaagggattgttgacaggtgtatttctagaccatatgacatgacattttgtgattatttgaaatgggaaaaattaatgccttatttttaagttatgttttatttggatatacatagctatcattaaatcataccaagcaacagatgtatatggtatttgtgaatcagtcatgtaaatttgaagaaatatgattatagccctaataatttttaaaagataactattttcttccttcatctgcaagtgcttaaaaaatcaactcacttataatttttcctaatcccacaaaaagaagtatcatatttaaaggttttatgactctgttaaaatagagtagcattttagtgtgggcctatgtaagcatcgtctaatgcaattgttgggaaatgcacacatcctcgaatgctaagtatatttagctaaccatctgaaggcccatgaagcatttctgaaatagaaatgcttgcttcagcagtaaagaacattcctgacttgaaattcaagtagaaccaacaatgtccttcttgattatcatgaggcagttcaaaaggaaatcttctgtacccaatgaatagtgtcttttatagcttggattctgagcaaagttaattacataataaatagtccattccctctttttaggtgcctttcagtttatatacaggtcattggtaatgactcagaattgaaagtattattattattattattgtcagaatattttacttcccatatgcaaatactgctttgagaagagaatgagaataaaacgttgttgactcacattatattgataatccactttatcatatatctctgcttctaagatgctagcattagcaataggtctgtagctacagatagttttatcatataaagaagtatattttacccagctgtctgaggagactttgagacttattcctattagatctattcatgtggaaatggcatactctttgatctggcattctgttcatttaacttttgtttttaatctagtaatctgtatacctataatacattgataatcagtaacaaaaaaaaatcaccagggcttggtaagatccctaaaataccctctgaatcatcagaaaattaaaatatatttggtatatctttaatgttataaattttcttgtactataattttgaaaaaatattatatggcccatgacttaaaatacacattccagagataagatagtagcaacgttcggccaagtactggactgaggagccaagaaacccgaatccaagtcccagttctgtgactagctggttgcatggggtagaaattcatgccaacactctgagcctacatttcttcattacaaagttagtgggtggaccagataattagacctttttaatcataatgcgctataatctgaaaacattaaacaccagataatagtattggtactgcacgtccatctactccaacaaaaaattcacaaggcaattgaaagttcttattctgtatatctgttacatatgtaaggcttttcagactttattccagaactgtccaagaattatttatataaaaaataaacatttaaaaataaactgttaaccttacctctatggaaaagcatttcaagatggataaaaagtgtttattacatactatggaatcaaagaaagtgtagatcaggtggtcctagaagtctgagatgcacttcaggcaaaattaacatccttgaatggtaataatctagcctgcatgcacactatttttccatccccatcccaggatgtggaaaccatgagctagatgagactgaaatgtaggcttcagtttttccagccttttcctgctccaacactggctctctgcaagctttgtgtctttagtcttctctttctgtatcaaccctccatacagttccaagccctcatcaaggaaatgcagtccagaatattttgagatgctatgaagaaatatgtggccacacccaaccatactggaagctgctggttgactctgctttctggcttctgagtaggccctccctaggttaggaatgcctttcctgtcactcccctgccactccttttggcttggataactccaactcatcctttggaagtaagctaggatgctacctactaaatcaagcctttctgggtgcctgcctcattttctgtcctctcttctcctcccctctctagcagttcgggctgctttaggatcacttttcctgagctcttaaagtactttctacttgtctgttgtagaacctactgcattactgtcaatgccccttttcttggcactttgcctccactaaactgcaggtcaaggactctgtcttattcattattgtgttgctactgcctagtagagtgcctggcacacaraaatattgaataattaaatgtatacaagtcaaacagtattaaacaaactcaattccttctacatgttgactccatcactcaatatcaactttattttggctggcaagagttgcartaaaatcctcggcctataatttaaatttaccagttgtgaaagctttcaaacttagatatttgtaccacatatgtaccyaggtgtatggtgaggctgacctttatctggaactatgaatttgtgcatatgaatactcaaaacagccttttaatacatagaactgawaattcactagatggttttccatcctgaggcatagatttttctacaactgattccctgataaagtcactgattttaaaaagtgagcaaattggaaacatttatatagaattctttttaacctggcacactacgtaaatcactataaaattaagaataagaagaattaaccaatgtgtttgatatcattttcatcatttactttgtatgtgtgtgtttgtaccatttaaatgtggatttttttatttttgaaaagagatggattgaattatctcacagggccagatattccagccacttgggtatatatttcattggcattaagaaaaacttagtacctttattttgcaactgggaactcactgaaaactttgcaatttgcctcaaagtgaagatttttagattaattgttttcaggaaaaggttatactctgcagaaataatatggttatttacacaatcaacatattatcacaggtgaaaggatctataagcatgaactagttgtgttcacagacagcaccacagactaggaaaatacatgttctgtyaatggctggtaataaaatgtttttctggattagcccaactgtataaatgggccatgctctgtagatttataatgatgggtattatattttcctaaactgaagatgcacttaatccttcatgggaaaaaagatgtggcaagaggtgtttgaagaaatcatttctgccaccttattaccttttggtgtattattcaattgtgcaaatttctgtatagttcaatacaatttgcagatattttatatcatgaaaggaatgacatacctcttaattgaaggctttttattttaaatgaacgaatttcttttatggaatgatgctgtattcccattgagtacattagttttctcatagcatgttttttaaaaatcaaattatctctccactrtcgaacacttcctgggatataattaattgtggcagtattttataggtgatggataaaagtgcacgtggcattcacacacacacacacacacacacacacacacactatgtattcagtgatgtaacttcatgtcctctgtttagttcataatcagaggtctataaatattttgattcgctgtcgcttctgaatgtatgtcagttatgtgtccttgcttgtgaacactatttcttaaatcttggttgtcatggttatccttgttaccattggccaactaacatttagcctttctttttcctttttttgctgcattaaaatggagcagtaaacccgacaggtgaggaatagagracaaacccctttaatgttcagtaagaaaaaaataaactggtagacttcagagttgttgaagaggggagggcggggctgcacacaaaagataatacctggcacgtggaagatgggcaaagcctacatatacacagtaacttcattaagatgattctggggaaaataaatattttgtttacattagaaaaaaacagattaaaggcgaagtttaaaagatagtacacaaaccaatatctgagttttgtttgtggtcaagattaaaatgggcatttgtgtgtgttgatgtgtttacagagcagamatgtgaggtgtctcataaactgttttgttttgttttgtttgtttttaccaaagattagttttcaagtttgagtacagatcacctaatgatattagcattttcacatcctgcaaatattgatgacagtgccttagtgagaactcttccccaattcaaaattattatccatgtctcccagtcttgaataataagagcaataataatagctaaaatacactatgtgattattgaatgattaatccaaactaaccctctagctttctaactcatatctatatattcatatacacttatgtataaatatacacatgtaacatatatataaattccygattaaaattaaactacaaaaaacatcttgaagatcacctacctttctcccaatgccatattccagtggtttccattgagtggcctctggaccagcagccatagcgtcagcaccaccagggaacttgacggaaatacacacccttggaccccrcctcagacctactaaatcagaaagtctaggcattggcccaccaggctgtattttaacaagccttcccaggtgatgctgatgcatactaaagtttgagaactattgctgcattatttacactaaaatcactttatgttggtcagcaagcctcatgttcaatgataagaatctttaaacctctatgagggtgtcttctttgtgtggacatctctagtatccatttgtccagcagaaaaacacgtgcaaaatagtttgtttttgttttttcagccaaaagacaaaacactttaaactcacttaaaatactacctttcatcggccaggcatggtggctcacgcctgtaatcccagcactctgggaggctgaggcgggcggatcacaaggtcaggagatcgagaccatcctgactaacacggcgaaaccccatctctactaaaaaatacaaaaaattagccaggcatggtrgcgggcrcctgtaatcccagctactcgggaggctgaggcaggagaatggcatgaacccgggaggcagagcttgcagtgagccgagatcgcaccactgcactccagcctgggcgacagagtgggactccgtacctttcatcataacacttttcatattttacaacttaatgctttctttttctattaaaatgagagagttgaaccaaaacttagacatcctcttctaatctccctctattttatacacaaataaactgaaaagaaaatttgtagttgacacataccagtagtggcagagttgggattacattcttaatgttaacagaaacaaatattttgattgatttacttgaatattgatggtagatatttctaataagtatatgtttctttcaaaagcctcttctcacatgtctgtatatctttgtttcaagaccatgaattgatctttcactcaacttctctttgtttttttcttccccccagatgagagcctggtgaaagcaaaataccccgtagaccagagtagcatttgtattgtgtattacccacatcccaaacaaccacatgcttttatagtattagcagtttctgacagatccaaaatgtcaagtgatcttccatttccttttcacctacataactcctccacatagtagatagttctcactgcaagaaataaactcgcactaacattttataatcttaatagaaaaaaaatagagcaaggcaaaatttaaaatctgtttctattcattattctttccatttttcaaatcgaaaatgagaatgatgagacctctgaaatttatcaggaaaaaaggttactagttacattcatgttgggcctaatttagaccrttatatgtcttttaatattttatgacaacgttttaaaactctttagtattattaccaatgatgaccaaactcttcatcttccacatctttcctagaaatggtttctgtgttagaaaacaatyattctagcacatcacataataagtgtttaaaaataatgtgataagaatgtggacagccagaattatccatgttgtgatcatcgaaagaaaactaagcaaaatacatttaagcagctggttttctatttgactaggatttcaggagtctgaggtcttggaaataatttcatttgaataaacagtgaaagagaagttagttattaaatgtcactacatccctccctgttcattcaaattgtgaattgtaattttagtcccatgtcttgagttttctgagactcacatctttgcaacaagatgtaattcctaactttccttgcaccagagaaatgggctaaattactttagagagttttcttttctaccctccagctcagtgtcactcaccccagccacagggaaaaagaagataaggaggttaccctacaatacctgtaagagtaaagtagttttcttgcccagatagatatttctaattctggtttccataatcttgcaagaatggcagagccacrwtgggaagggagaaaaatccaaattttagtcgttgggcctgacacattagtaaagaaatgcgtccttgccaacttatgcaaaatgatcaaaacatgagaagggccattggtattatttgaagtgagaagaccaaccatatgtttcacgtggaattgactggctggctgcacccagtgacgtttcattaacccatttcgattttgcatcttcagtggtaaaaggaatctcttagtgtggtgaggcgaagacccatagcacagacacagtgacattgcctactctgaaactggccatcatgtcctcctttcgcatggtcttatgagcctgtctttttcttcgtcctcatatctttttcaccagccctttgtctcttctttttcttttcttcttcctttctactccatagaactggagctgccagtaccttggcaggtcgcagaatactgctcacctctgattggtggaatgggttggcagcacattttgtcccaaggctgtatctgacacctttaggtagaaagaagaaatcctcagacaggttaatctaaggtaccgagaaagcaacatgtctaataggacttagccatgaaaatgtattccattaaggatgttttgccaaaggcattgcacttgagcaaatcatgtgcacgtcccctttgtatcaatcttctcttcaccccctggttagttttattttatacagatgagcagaaatgggaagaaaggctatttaacaggagccctctggctaaccatagaacgacctgggtggcattgaatgagaccccattgccacagcaacactaatgagctgtaccacagtcacatcgaacagagaaaaggaaagttcctaaacactgtgcagcaccttttcccccccacagtaaaaacgcctttgctttgagcaggggtgagatactaggattgtgactsyggtgtagagattgcaggcgttagtatttggaaaaaaagcactgtttgaaaatggcttctattgattcaatgggtttttaatctaattcaaactggaagaagatagttaggactctgtgattaattttttattggataaagaaatcttatatacagatctgacatttcttgcttagaaatttgttaaaattacataatgagagcttaaatggggatatctaataaagctagtagatagcttttaraacaaagttaaaatgtattgtgtgaagaatcacatttataacaaggcactgtcaatggcaccttgaatgattatcaggagcgctgatctacccaccaggtgaaattactttttctctgatctttctgtgaacctttcattaacaaaatattaatcacagttagcttaacactgttaagagctaacactgtttttttyccttcacatttgaaagagaaaggggagttctgttttacctggtcccgattatcctaggcmttaggataacttggcatcttaaaaatgcacttgtgtttacctgccttatgggaaaatctacggcatctactctctgtagtcaccacttatatatacttagggctaagggggacagatttagctgttcagcttaaggtcaggtagtttctctatggtaacaacagtcttagtattggcaacttaggggtatcctatcctgttcctcacaaatagaactagtagataagagagaattgctcaataagggtccatgcgtatctcaccaagatccctttgaaaccaaaaggcagagttgctgaattatttaatcctgcagttggaggaggacttcgagatcattgacttaaacaaaaattttagacctgagagaacaattaggccaggggggaaaagcaacccgaactgggtcacaagtcagctgggttgaaaagttgtaaaactgaaaacttgggaggtggggggagtgcaggtgcaattctctgcttttctatctgtttcaattgatttttcttttcttcttaaatttctattttccccctataggaagagggcagagtccgactctagaaaaagcagcatacygaacaataaggagatcccttcacaccacccaacagaccctgtagaactgaggcgccttaactttcaaacaccgggtaagaagcatcacacatctaatccacacacagtctttcccagaagttgtacagctcaaytgatattaagagttgaaggtatcactttattttgagccattttgttcatcctgctcttttattttactattatggagacttgcccaagcaaaagtctgaaaggaaattaagttctttctgcaaaccggaaattgggtagggaagaaaaagaaatatgggtatscttcaaattttggaagaactatagtctttataataatatctaccatttttatgggctttgattattgtttttattatttccaatgacaccactctggaaagaattcagtttctcatcaagtgaatgaatgagtaaatggatgactgtacacatctttcatcccatgggaaagcatagatttgttctatattttcctttttgtttgtgtttatggtactctgaaagaggaaggaagaaagggagggagggagggaggaaaatgaggtaaatatttttaaatattacctatactaaatttcactgatcacttcaggcttcttactagagagaaacataaagtgactgaggataacaaaaaatatacttgtttcttaaaataaagaacattaagtgcttcaacagaggaacactactattcctactgaggggccttctgcacaatattgtttattcatgcctagatctatttgactttttcaactaaagcatgtttataccaaatgaatggcaaattatgaatggcagagggagctgaaaatataaaaccgagtgaccctatcttaatatgttatgataatgaacaaagtgaaaagctaatctaagaagtctttgggattaaaatgtggttgcagtgttgtcccacaaattgtagacaagtttctttgtgccatatggatgttctgattcacagtatgatacactgcagatatattacagtacacattttacagtgaattattttgaacatggtttattatgttcagcatattttctcttttacatgtagatgtaacatagtaactagtaactcttcaattgaaagaaatgtttagcattttcagtgtggctatacaagcatcataatgtcggtattwaaaaaaaattctaactcatatgaggttagactttaaaaaaaattatttcatcatgcaccgggaacgtgtacatgatgattgaacaaacttgtgtcatcttccaggataggtcgtagccctctggatgcatcttgttgagtcacctactcagtactttattaaggcaacttgatatgaattaagttactgtagtaaatttcrttgggtcagcgctttttgaaataggtggatactaactacttcagcctataggcaacttctttttgtttttggttgtttgtttgattgatgggttttttgagacagagtctcactcgattgtccaggctggagtgcagtagcacaatgacggctcactgcagcctcaacctcccgggatcaggtgatccccctacctcagcttcccaagtagctgggactactggggcacgccaccacatccagacaatttttttttttatttttgtggaggtggagtttggccgtgttgcacaagctgggctccaactcctgggctccagcaactcacctgcctcagcctcccaaagggctgggattacaggcattagccaccactcctggcctacaggcaacttcttaataatggacccaggaatttatattcctttcaatttagcaaactcaatgtatagaggacccaaaagctgaagaaatgatctgctacatgattccttgcatttcttacctcatcaccctgtaaaagagcaacatgttgtggaaatagaaaaacggatcagatttctcagtaccttgctgctagctctccactgcccctccttcctctgtttttcacataaatgtcatttgtgctggaaccaaccttggtcttccaccggaggcagaaacacagtataaggttgagcagaaaggcaarggtacccccaaaagaagggagccagtgagagtgctgctacacctcacctcctctcgcaccaacagaaaatgtttccgggaataaacacaaagcaagaatgggaactgtgtagagagaatgattaagaggtgctggtgactgcaggtaagagaataggaatgtcttcaaccaggagacttctgtctgcaagtacttctcactttcagatgtaattttgcaaatatggccaaactcaagaattctattagcaatttaattttcccaatgtatttgggaatattatatccatttatagagagaatctgttaaattttaggtaagataccagaaagaagaatgaatgttacaattgtaacatctcttgtatcaccaatgactttacaaaattaaaatggggacctgagtataaaggaaggtgtcatttaactaaagttagacttatcacctcaaatgaataagggaataaagtagacaaaatgagataagagaggagctgtagtagacaaaatgagataagagaggagctgtagtagaggaggagactagaaaaggagaaattgtcctaaggtcctagcacatctgttcactcaggaagcagtacattatgccctttagctcaggtaagcaattcacttaagcttgatttgctgaaattgtttatttgccatccaagctctatgttgtggcctgctgtctggaacatttttaccattttacaaaggaaatagactccgctgttaatatgaaattcatagagatgtgaccatttgcttcagcctgcatagattttagccagcggctgttaattaccataattacttgccaataggatgagagcagaatgtggggttgttaacccagtaacccttttgtggttgttcttctcctctttttcacgaagaatcaagggttttcttggataatgaaataaaataatccttcattaggtgttgcatgacaggtgctatgacgctaatttytaggtttttaaattatttacatttcactctctgaaatgtggctttttaatatatctactatgaatgtataattgcttatccccaaacattataacgcttgagaatatttattaataatatacataagtagagaattagtaatccacaccttctgttcaaaaaatgtctttcaatgaaataagatgcctgtgatttatataaccagtacctagtacagaatttgttcccaaaggcaaattgatttctgcttctgatgggtctgttatgaatgataaaatagcaaacaaacattacgatttgaaattcagtaggcctttcagaaggtaaagaaagcacattgcttagttcagtgattctataaattctactttctcaaaaaagtcatcttgtgaatgaaagattgatttacattctaagttatttattcttttggagaatcgagatttaagaagtcagatcttttttccttaattctgcccgatattccccatttcatataaatatagcattccaacaatctaagtacgtcaaagaactgtacccttaaatgcagtaccacaaacatagttggatcagaaaaagttagatttccatccaccgttgctcagctaaggcacaaagaaaagacagagaaacctgcttttttgtcagtataaccatccttgtgaggttggagagtgtggagaggaacattgctttagcacattttcaaacttttagacaagaatcaagtcactctctgacactgctgagagccttccaaagaagtagcttggacttgaatctgtacagagcaccttaaggagttgctgtatcttctcattctgaagtcactgatggtgctggcagctagaggtacttcagggctgaagcccactagttcgttattggcaacaaagttcttggtcttttttagcattaagatgagtgaaaaaagaatcaccaacccagccccttctgaaaaactattttatttttctcttaytgagcataatgtaattgtgacttaaccgattgctgcatcagagacaatatggaattgttgaataaattttttttctccccctaaatggtagtttttctaggaataggactagattcaggataaacagtctgataggatcccaggatgctgcatagtgttaggaccaatctattacttaagtgatgtgttcacatggtaagtctggacaaatatacgggaacatttatcattttttgtgcttgtacactttcattattaaagtatactttaaaatgaaaaaaaatatcctgtcagtctgtgaaacactgtatgtaaacacctgaacaggtcggggaagcccatgctttcacaattgaaagcaggcacctcagcttgtaagtattttgcatgattgattgtaagtgtctgtcttattgtggttcagatggcagtgtatagccaagttatatttgagacaacatgagctacctaatcatttaagagaataatgatttaaacaataaatcattattagtgtacaaggtcagccagaattagtgtgaaaaaggcaatttaagtaacatcagttgtatcaccaataactaccaagttaaaatggggacttaagtatataggaaggtatcatttagctaagatttgacttattaattctaacagatagtggaataagatgggcaaaataagtaaaagagagaggtgacgtagtagaggagtttactggaattattaactgctgatcaagttttacaagtctttaagatctatggaagaagggaagaaaatattcacttataaaagatgcatttaaaggaaatgtccattaagctccatacatctctgtagacagcagtaactgggtgygcactaggatgggtgaatagatatgttgcttgttaaacaaagatgaactgtgttagccccatttgcaaggaaagttttctctttctttcttttataaacaatttccaaattactttagtctctccgtcccagaacatctttttaatttcaaaagcaacatgtttattggggaaattttggaaaatagaaaataagcttgttaacaatcattgcatatagattgtgaccatttaggtgttcattatgttactctttaattttgtgtacgtttgaaaatttttataattatatggtgggaaacggtccaacaaaagcacttttagagaagaaaaattactcttcattccaccacttttttttcttttttatttgacatatttaaaattaaaattaaaatattttgtgtcattactccaattaagtctccagaaatatctgccatatagagtttcatatatacctttccagaattaatttgtgtatgtagttatttaaatgatataatatagagtaggtagggatgtctgtgtgtatgtcatgtatgtatacacacacaatttgctgttgtgacatttaactatataaaaatggacttttttcaagtgagtgtattatgtcttctttttaacagataatgacaatgatggtagtcagttctatagatatcaaaatgtattaactcattccctattaatggaggctaggttattactcatgttttgctattacagatactactgtaatgagcattactgagcccatatattttgacaccatcattgctatttctgcatgtcagacacctggaaatatgatagcagggtcctagggtaggcacatttaccattttgatagagagacccaattacagacttttcaaaatactgtaaaaatcctttactgaaggtttgacaccctctggcccatggcctttagaattgggcaaaatgatgaaaataaacataatattattaaaagatggtgatatataagaaaaccaaacaaattactaatatgtgttcatttttcttctttttcccagcaaagaaaatttagaggttgaggatcttagagaaattcactttcttttcagtacaaagaaagttgtaagagaagatgctactggtagcattggtggtgcaccaatcattaccttcccctctgcctgcatattcaatattaaagtgtctgctgtccctgttcatacctcctccctggcccaaaaatacctgcaaacaaaaccaaaactatagtgtttatgcttgcaccttttaggaaaagagatttaaaactcgatgatcagatgttacaacacaaagacctcattttcattcagtggatgaccttaatatgttttgccctaaagcatacatggatggtaggtgattgatgggctgtgaaaacagaaacaaactcataaaaagttaacggatcagaaatagtggtatcagcagcagaaatgtctgcacagcaactgaataagctttaaaaagctcttgagctgtctcttctgatctattaatactattaattggatcaatgctaacaagatccatttttatatatactttcttcatacattcatattttattttatacagtaaggaatttaggcatatgacctaggttaagaataccggatgtgtcctttctgttttattttctgaaatttctgatataaagaaacagcttgttcaaattctgtattttgagaaactctccattagaattgaattttacaaaaattttttaaaatgttttgaggcaggatcttgctctgttgtccaggctcgagtgcagtggcacaatcatagcttactgtagcctcaacattccacgcttaagtaatccacccacctcaacctcccaagtagctgggaccacaggcatgtgccacaatgcccggttcatttaaaaaaatttttgttgcagaaacggggtcttcctctgttgcccaggctggacagaaactcctggaatgaagtaaaaattttgaattttaattatgccattcattgcttacccagaaaagcactgttggtgactctttcatttaatgatgatccccagtcacaaattaaatctaattgtcattatggttgtatcaggaagcttacaaatcaatattctctttatctttaatttatcattagtttgtgatacaaataacaaatatagcagagtatttgtatttgattcagggaattctaaatagtgcatacattatgtcaaaaatatgacaaatatttaatgaatgaattttctctttctggctgttaactcatagaagtctacttttgttaagactgtggtaattgatttgatgaaaaaattagcttctctttggtccataagcacaaactgttctccagcctttatcacaatttatcagtaaggaaaatcatgaagagactgttactgagtcattacaaacacacgtatatagtgacagaaaaaaatcatgtaaaagatgtaccaccgttattaatgacttcaaaaactctacttagcagaatagttatatagtgcctattggcatttaatgcaaggtttaaaaatatgaaaatagagcaagtgtttgataaatatttttctatggataataaaatcatttgaagcattcagtagccttactgacttagtaaaacagagcaggacttttgaaaagcaaaaataccataaattagcttctaagaaatattctgccaaatagcattccagtttttaacattttaaattaayacctttagttcatgttttcttggaaacttaggatattttggcaagaaataactggaaaatacagacgtgtttttgcatccccttttcctcttccccaccactgaaacagatgacctaggttaaggccctgtattgacactttttcacaaactgaggatggtttatgatctctgtcttgctgcatagagagcccaaacagtcttaaagacccagctttatgtacatgtcaccacttgtccaggggtgttaaatggttggaaagacagcatggcgtcatgtgaaatgtgctaaatgagagtgkacggggtatgggatcagattcctcatgtagctacagttctgctgataatgatgactttgatcgagttctttaactcctctgggcttcatttttctaattggtagagataatgggggatcaggttagagagaagsggaggtagatgaacccataggggatgaaccatgcaagaagcatacttctttatatccccagcacaaagcagtatctagtccattgccttgtggatacaagcatgcagtctgtcactcccaacactccttgattctaattcacatacacacagattaaagaaggttttgttcttttaaaacaaaggccataatctagttagccgtatgtggtctgcaaaagagcttatcgtttgacatggactgagtttcaacaaaattttgagtcaacattgaaaactgaggaaatgccacacgatactctggattttgagtggctgttgaaaacctgaacagtctgaaccgattggccttgcattcccacttggcagagcaagtcctggagctgaataatttcacccttttcagaagccccccaatgtgtacactagccctaaagatgagtgacattgagactgagcgttagttgccatttatgtcacgcttatggctgtttttcacatagtaaagaattactgttctttctggagtctctgttcaaagtagagacacaaaagccagccctggaaacctgctcattgtgaggaaatgggaatgagcgtattttctgtgtgtgaaaatgttgactatatgatacttagccctcttcagtcatttatcttaccagcctagcccaytccatctgtggagactttgccccccacttcatttagaagatcgcaaatgccgttctcggaatagtacagtagaaagatgcccaagctgcatgttgagatgttgttatttactgtctgggcttatgtagagaagtcatctaacttttctggatttgagtcctcttgtataaagtgaaagtgctggactaagtcatctctaaggtgcctctcaggttaaaatgccatgattttaaagtttacttcttataaggaagtcaccgtgacatcagtctcaccaatatgtaccctattaaagggagccatcttgttttttcctccaacctaaggcagatttcagtgaccgcatctgtcatttttcatgttgactctatattgtggagatcatagcttcaaaataaaaagtcttaacagatttgatgcgtgcctttaaaatgcatttatgggtcgggcgcagcggcccacgcctgtaatcccagcactttgggagcccgaggcaggcggatcatgaggtcaggagtttgagaccagcctgaccaacatggtgaaaccccatctctactaaaaatataaaaattagccgggtgtggtggcgcgtccctgtaatcccgctgctcaggaggctgaggcaggggaaccacttgaacccgggaggtagagcttacagtgagccgagattgcaccactgcactccagcctgggcaacagagtgagactacatctcaaaaaaaaaaaaaataatacatttctattgtacatttgtagcttctaactgatgaggtcatgacactggcaagccctccctgtttgttagctgtgcttcaagttctttgctgccaataatagctgagtactaaagcttgctaatggggtgttagagaggattcaagaatatcaccaagagaaagctcatctcattctcataaatcctgatatgatttctaaatgggaaaaaaaggaataaatggagttataggccccccatcatgaatcctataggactaagagccagtgctgaggaactttaaaaatatcaatatatagctcccacatccacagacctgaattaattggtctggtgtacagcctgcaaaaaaaaaaaaaaaaaaaaaaaaaaaaaaattaaagcacatcaagtaatttaaatgtgtaaaatctgatgtagtaaagactttggtttatagactgagcagtggtcaggttgccagacaaaacattgaaaaggtaccacagtgaggtcaaattcatagttttcttagtgtctaccttttcattcaaaatctaacatatttgtttatatcatgtaacattttttttcaatattgggcagcggagatgtttctgcagaattgtgtaacaatattttgaagtagatccttggtcattgttttctgatatgagctaaacagtttcaacttagaggagttttactcttgatgattatttttatgccgacattcggtcttttctgatatatgatataacatcataatagactgtgtatacattttggctaatgaaagaaaatagcaacaaacttaaatagttcaaaaaataaacaattcaactgcatactagttttccattttgtaaaaagtaagtactctctcccttcaaagaaaaggtacgataacttttagaacccttacatatgcaccaatagacccttctctgttcagaagttctgtctatatgtgggaagaatgaaagttatgaagaagagaatggctcttgaatttatctagttctatactcttattttaacagttaaagaaatcaaggcgcttcacaaaaggtgatttgtccctrttagtagatgccaaaaccagaagtagaacccatgtccagtattctaagccagggttctttctcctgtaccattggattcacacagattctcctcccttttctgtgaaacatccatctgccatttttacttgtcttagaaatggagtgcaatatggtatccaatgataagttttatgtagcgattctttaatgctgtgatatcttgcatgtgatacatatatgtatatatattctgatgtggaatataatgactcartgtaggtctgcttgaatttttctttaataarcttccaatataatacttccagaccatgtgccagtgcatgccacaagtaaatatgttgatcacatctttggttattattatggtcttctactgctgttatactaatacttttcccgtctccaactggctttactttttgcagctttgagcagtaattcagtcccctacgcctccctgattggctctgtgtcctccctctctagccaaaccaccactcagtccatatatgataataactctctcccacgatccgctcgaaaaggtctaaacatctttgtctctattattttctctgtgaaagcactgtaatgatgtccacatcagtccatttccatttccagataagcctaaagtcacctatgcctttgcatttccattcttttcgttgggggtgcctcatctggataagatcacgtaattatcagatcactgtcaccctcacacttcctccatagaatgtaaattatttcagttctatcattaatacagaaaagtttcagaaagggttccaaaattttgttccaaaggcattattatatcaccaacaaagagtttctacttgcaagcaattcagttttattggctctccactaaaattttagctgactggaagcagaccttcatagccataaaaactaaaccaccacaattcacaacacttgctaaagtggttgtcttcaaaaagcagggtagctttttacttaacttaccagaaccattaataatttggcatttgagataaaggaacttactgggtgacttttaacaatggtataattcctaaaatgctcttaaagtagtcacatgtcatgttgactcaatggccatcattctgtagccttcctccaaagagccacagtgacagcagaatgtcaacacatggcttccagtttgagctcctccctcattcttttcctgcttcagtggcttccctggggacatgctagttcaggtttttstagccagctggaatttatatctgtaagataagagtcagcaatgctctttcatgatacttctgtaaaattaataggaaagaaataaaagacaaatcatatgamaagtgagaaaacatcagaaagacacaggagtcaccaaaattaatagtggattatttttcatggaatctatgaaattactatatcttccgctggctgaatgaactagaatgtgtcaccccatctctgctttccttctttcttcaccctctttccctcctgtcttttcaccatttgctcacttccctgaatccatttctcattagtggacaaagatgtttacacctgaagtagattgtaggtttgctgggggttgaataatggggacctggggcaaaatatcacagagttgttagtgtggccatttataaatgtccaggagaaggctgcaaccccaacctctacaatctgctactagtggaaacatttttgaagctcagtttggtgtctgattgtgccgtcagtgattatcgtcartgagtcgtggtgcatgtcattctttgtgtctgtgtttgcatgtgaatgtcagtcacctacaggtttgtgaaatattagcgatcttaatgtagtagtcacattgtactagccacaatgtatagtgaattctgtaaaaacttgcagcattttaattagtccttttaaaaaatatatcaggctttccatttcatttttttttgaagaatttgttctattttattttatttacaccatcatttcctttgcaggttcagatgattccggttaccctggtaaccttcattcttcaagttagttttccttgattatgcataagtcattttatgtttactatcaagctactactstttcccttttaggcctttctcagtgtctgttttcttatttcactttacaccatttaattccacacaatttccatttcacacagtgcaggagaaggagtttgaaatggcataaaagtcattactcaaagcagaagttgacatcaagcctgactgtcagttttttccactagctaacctyattgattcrtagcacaataacgctttcttttacactaggagtgttagtttggagattatgcttggtgacttttcatttggctacaaaattcatcttcccagagcatgtcctgctttgagtaaccaaactatttgcctgcttcctcacctaaaacatctttactactcacatattttcaggccatttctaactatagtattctctatattttggaatagttagcatcattttcatttgttttcaaatgtgtttcttctttscttttttcaataggtatggctagccatcctccaatacccatcttggaacttgcagaccacattgaaagattgaaagcaaatgacaacttgaagttttcccaggaatatgaggtaattcactgtgtttattctttacagtaatwtcaagagttactcttctctttttttgaccatattcttgaaaattaacttcatcagtgcttttccctttaaatatgactcaaatatgatataaaaatgtataatgaaccgtcaacttaaaagtgtctgcacaagcaatatagtaattacagtttgaaaaagttaattttatgtttgttcaatattacttgctgagattaygaattttctgtttttttatttttattttatttttaattggcaataattgtatatatttacatattatgcattattattaattatagtcaccattctgtgcaatagatcgctaaagcttattcctgccatctagctaaaactgatcaacatctccccttttgccagccmtccattggtaatcaccactctattatctactgctatgagtttgacttctttggatttcacatataaatgagatcatgcagtatttgtcttctgatttttcagttcctagaatatactaaattgataagctttccagcataccaaataggtgccaaatacactgatttgtgataagaatcctcatctagaaagaaagattacgaagattaagtacatttctcaagactcttggttttataagccatgaaaactctgtaattattgagtaygtgtatattatcttatccttcaatctaaattaatgctrgagctaatattaagatagaaatgtattttcagagagttgcttgtttttgaaggaatggtgcgctgaatgctatcttaaaattccagaatccttaaagattctttgtgaattcttgatggaggtaaattaaaagcctgtgtgtatgcacgtgcgtgcgtgtgtgtgtgtgtgtgtgtgtgtgtgtatttggatattgtggtatatatcaatcaaaaagttataaaactgggtatttctggtattctccagcaacaaggacccttaatgaagccaattaatgcattgttgatmactggacgataattgttttttctagaccagttttaacataagattaaaatgtacaactaaaatcttgtmgatataccaaataataaaaggttattgggtacctgggcagcccaaatttcaccatcggggtttctattgatttacttactgggagtcgttaacacrtcctgttacctcttggtatctgttgtatcagccttaattggggcagttgcactggacctaccagcgctaacattctaccctgtcacattctgtagtaacctctaagaggacccccaacctcaagtggcttasaggggtcacaaaaataagaagaagctccatgtaagagaacatagagcagtgaggcctgtggcatggccttcccaaaatcttcaaatattcaaatgttcattattttaagttactgtgctggaaaaccaaaacatatctgtagtctcattcacctccaccctcaagagccagaccacgtttcattcartttgcatactgcagcatctttgtcacatatttgataggatgcaaagattttgtttgtttccttgcctcttggtgaagttatatcttcctttattctgctccaagcattcaggagaacattttcaatgctaggaaaattcacaccggattgcacgttgtcttcttttctcaaatggtcgcagcttatttctttcctgctcttcctcttgatcagaatagctcctttaaaattatgcagtatcctttaaaacactttctatagtttctaatttagggcttagggctccatagtgagtttagagaaaataaggcaaatcataaatagcacctggggcaccataaaaaactcttagttatgtcaatttttatgaaccagaaatctttcatcactccaacctactttttattgttatatgattcttattattttgccatgtgatattttttcatagccctgctttaattatttatttttgattataagttatgtaatgggttacaaattacggaaatatgatagctcgacctgttartaagccgttaattcactctccaccaatataactttaaaccatgggcaataatatagtcatgcaccacttgatgacagggatacctttggagaaatgtgttcttgggtgattttgtcactgtgtaaacatcgtggagtatagcaaacctagatagtatagtctattatacacttaagctatatggtatagcccattgcttctaggctacaatcctttacagcaagttactatacccaactatttgtgtgtttaaacaaagaaaaggtaaggtaaaaaatactgtaaaaaagatttttaggctgggcgcagtggctcacttgtgtaatcccagcattttggaggccaaagcaggtggatcacctgagttcaggagttcgggatcagcctggtcaacatggtgaaaccccgtctctactaaaaatacaaaattagccaggcgtggtggcgtgtgcctgtaatcccagccacttgggaggctgaggcaggaaaatcgcttgaacctgggaggcagaggttgcagtgagccaagggtcgcaccattgcactccagcctgggtgacaagagtgaaacaaacaaacaaacaaacaarcaaacaaacaaatggtgcccctatgtaggacacttagcatgaatggagcttgcaagacttttagttgctctgggtgtcagtgagagtagtgagtgaatgtggaggcctaggacgttactgtatactactgtagactttataaacactataaacttaagctataccaaatttattttaaaagtttatttcaatagtagattaaccttagcttactgtaactactttataaaatttttaaactttttgactctcttttgatatcacttagcttaaaacacaagcacactgtrcagctatacaaaaacattttttctttatatccttattttataagcgtttttctatttaaattatattaactttttagaatttttgattaaaaactaagttgcaaagacatgcattaatctaggcctacacagagtcagaatcatcaatatcactgtcttctgccttcacgttttgtccactggaatgtcttcagggtgacagcctggagctgtcatctcctatgatgataatgccttcttctggataactcttgaaggacctacctaaggctgttttaaagttctttttattttaataaaaggagtgcattttaaaataacaataaaatgtatactgtagtaaacacataaactagtaacatattcacttattaaatattatgtactgtacctaattgtatgtgcctgacttttatgtgactggtagcagaataagtttaattacaccaacatctctgcaaccacaggagtaatgcactgtgctaggacgttacgacagctaccacatccctaggtgatgggaatttcttcagatctgttatagttttatggatcagtctcttatttgtggtttgttgtggactgaaatgtcattatgcagcacatggctataaaaccatcactcaagcaatctcagttgcatctattgaatgcaataactggcctcttttaaatgtggaattttcaagaaatgctacatgtaaagatactttaatgatcctcatttagccattagatcagaagtgcttcttgaaaatagttatgaactgcatgctggcaatgctgctatgcacagcttccccagtaggcttagctgtggacctgatagcccacatagactcttcactgatgttcatgatgatgatccatgattaaagctccctgggcatgaattgactctactgtgccttaacyrgcatgaaggagatgtttaagtgttgtattcaactgtgataataggattaagacctcaacataaaaatttaggctcagagcaacattttgtggggaaaaattgtttattatcttctacataaatttgaakagatttttactggctttcagcaaagaaaatggaggaaagaaaactcacattgctttcaaacacctgattattttggcataatcactgtgagtaaatgtttactcagaacttgtaagatgcacgaagctaatttttttttactctgattctaagactaaaacaggttaaaggcgtgaaagctgtttgcactgatcctgaggtcagaatmcgaggaagtaggttaaattgtagcacagtattattagatcctatgagacacttcctgtactgtaaaggccgttgaactccaacagtgaatttagtgaaagctggaagaatggacttgataaattagtgtaaccccatctctgcaggtctttataaacactttagatgtccattttctgagatgaaactgaaaagtcctgctggaatttaagtagtctcaatttgagaatggcatctggaatgcagggaagaaagtcctccttaaagttggtatggctgttaaagtccatatattaggctggtgaatctttaaatcagagtaatttgtgtagaccttgccaaacaaaatcttaggctggcgcctacagatcatttggttgcctatttaaaattgaaattccaaggaagaagtcaaatccctgaatagaccaataacacgttttgaaattgaggcagtaattaatagcgtaccaaccaaaaaaagcccaggaccagacagattcacagccaaattctaccagaggtgcaaagagaagctgataccattccttctgaaactattacaaacaatagaaaaagagggactcctccctaactcattttatgaggccagcatcatcctgataccaaaacctggcagagacacaataaaattgaaattcctggtcccagccccagaaatgctagtttaataggtcagctgtggtatccacaaatctgcattttaaaagagctcttcaggtgactttgatgcaggtgctccaaagacttcaatttgaggmatgtcattggtttagggtaatgtattacagaacatgacccccagtcttcatttcaccattttctgagatagcatatagactagtatatttaaaatttaatcagtaggcatcatcacagtcatatatatacaaatcttatttagactagatagatcgtaagcaactgcagcccctagaaattctcaaggaaatacagaagagcatttttgatgtattatagggccaaggctaacagtaaaggtacacattaagaactatcatctaaaactgaagggctgtggcaatttcctgatatcttctctggagctttcatctttgtgctttctctgtggtggctttattcttccccttatacaagccagcgtcttctttttttctcacccacgcacagaaaacatggtctgtaatcatattttcatttacgtacaggccccataaagagactaagttgtacttgccagtcatgttttaaatgccagagagcaaactctgaactctatytaattgactgtttgttgtggtgacacacattgggacgtaactgctaacagtccactcatacagatcttagatgggggagagcgaagtttctgtgtaaggaggcttgtgagctgggaggaggaactaataattatccactacagtactacagaaaagcattgtgctcagtgctgagaaaatatagaagttgtaagaaacctgtacttctggagtttgtagttgtcaaagacaagtatatacaatcaaacgagaattacaccaaggwggtaawcttaagtgctggaatgttattgggattcagtaaaggtcataatgatctggagaattgagaaaggtattgaagagaagatggcactcttagtggaactaggaagaggagtgaagtgcattttatcaagggaaaggcacatgagaaatgaaygttctggtagtctcatagtcagtgtggactacagaccagcagcattggcgtcacctgggaacttgttagaaatgtagaattwtaggtrctaccccactgctactgattcagaatctacattttaaaagatattgatgatgtctttgtgtaataaattgtcatcccagctgggcacagtggctcacacctgtaatcccagcactttgggaggacgctgcgggcagatcgcttgagtccaggagtttgagaccagcctaggcaacatggtgaaactgtctctgcaaaactacaaaaaaaaaaaaaattagcctgtcgtggtggcatgcacctgtagtcccagctactcaggaggctgaggtgggaggatcacctgacccccaaggggttgagtctgcagtgagctgagatcatgtcactgcactgcagcctgggtgacagagggagaccctgtctgaaaaaaagtaaaaaaaaaataaaaaaaattaatgggcatcccagtggtcactatcaagaaaagctataaagttagagaaaatgtaaaactagttcccaatgtggtcctcaaggtacagttttctaatagaaatactgtcccaaatcacatactctacttcaggtacattctagatgttatacattttgtggtgtgggttgagataataacccctttttaagtagttacaacaacagcattttttctgagttcctrtcagctcacttacaagtcacattttggaccacagtccatcctgtcatggtagttacacagagatgaacagtcatcagacatctagtttcaagttagtcagcactagctctgttagtagtattaccttaaagctatgtattaactcggagcaatctttctgttgccattggagagggacaagaaactctgtggttcacagaagtgttccctgaagaaggcctctttgatctgttttgttctcatcacaaagcccagtcccaacacatttgctgccgtctctggatgtggactgtctccagtctcagtgctcacatgtctcccrccattcagcacccacatgtgctgagtttcttcctgttctcatggcagcactctcacatctcctgtctgtgatgatgataaygasccttttatatgaaatatttcagatatcagagccctgtccttctgtttttataacaatatgtattacacctttgtagagtaagttaaaatcttcccatcactcagtaagacagataaaggaaaaatatatttccttgatgaataatgaaatacatcaagacagtgttgagacgtatagagacattaaaaacattgcttaggtcatgttttttaatatttagagctgtctaaaccacagagatcatgtggtttcactctcccatcatagaggtaaggagcataagactgagaaagaagtgacttacccaaggtcacacacctactatgtgtggtaaaaccaggtcacaaattcatcttgttttgttcttcttcactgcaccttaacttacctgatataaacacttaaatgtttcacactttatttcttactatgccctgatgatagagttcagaaaccttagtatcaaactagatcaaaatattgatatttaaaatttctgtgaaaatgtcatagttaccaatttccattgcatgactattcctgggaaaacccagtggttctctatgacatgctaaggacgcattgcttttctccatagataatttgttcactcctgatagtaaacattgtatttctccgcagaggggacaaaaattgtctgtcatctaagcaatgaccacaaaagaaaacatttctattttcccttggaaaagactcttggtatatttgaccacatgtgccacagtgtattcacaggcgcagaaccatcaytagtaaaacagtcatcattattaggttttgtaaacctctgagcacttataatgcaaaactactgtcatatctgctttctattagtttataatttatgtgtaagctcatgaggggggacatgtattcaagaatcatacaaacaaaaacaagaaaccaaacacacacacatacacacacacacaattttttttggccaacttcgaatgcactggattttttcttgaaggtggttcccccaytttcttgaaggaaggaagtggtggacgacagagatctgttttcatcttttatgcaaagtggaagagtggaatagactcttccatttctaagggaaggcctccatttctaagtatttttgacatatgagtcacaagagataaaagattgtttttaaaaaagttgagaacaaattatggtggtttggtaatggaatgagaaaaatgagcgattttgtgaaataaaaagcagtaacaacatttttgtacctgggatggatgaaattgaggaagatgaatggctaaatttactattccagatcagaatctcctaatacrctgggattggaggtgggtgtgggagagtctttgcccaattccttacgaacatggcagtttttctgcttctcagattgggtccaaacctctctgcctgccactccgggctttctacttgttgagccagcagtgggaataaatattatgacacagttgctaagtatacaggcccttggctcaggtcaccagtttggcccctagctcaaactgtgtgaccttaagcaaatgactgaacctctctgtattttagtttgttcatstctatataaagaagcagtcatagtacttacttcatacaatcattaaaaacaaacacatacatgcttatcaggtttcctgacaccagtactcagtagtcttagtaactattacttattttatctcatctaggtgccatcaattttaagatacyccatcattgcmtgtaccactaaggaataaaagatatcacccctataaytgcamgatgccatcaattttaagatgcacatcaatttcagagatgttagaatgtggaaaggaaatgtatgtcttagaatcaatgaaaccctaccatttcctatcccaggccaaacccttagggctttgctgatgtcagtaaaaaaaaataataataataatmataacaataakaakaagaagaataaaagactgaaagaaatggaaacttgctagtttaaaccagtgcaattatcacttgttatgttgccctttcttactctccagtcatttgctgtgatcaagcctctctgggtcaggtgttttggtcaggtgtctggcctctcggtatgctgttggccacgtggtaacaagctcaccgctcggcacacagcaggtgattaaccaaagtgtgtgtctggatcaatttctaactaaatttacagttcatagaaactctttgttgtgatcaaaattgctagtatcaacaacaggagcaaacagaagaaagagtgtcctgctgtaaagagctgctttttccagtcgacatccccacctgatctatcagcagtgaagccttattttcaggctcttttctctcagaaaataggctattactatctctagacagtgcagaagtgattacattttaatgcagacctctcagatttaactcaaaagtacctactgaataaagtccctgagccgcttttatagcaaagattggcctaccagtcggccatctgagaacatgctgtctttgttctgcagttaaggaccagtctcaccaagtaaaatgaaaaagtacagagtcccctcccagtgggctgcttttggcatcttataaacaaatctagtagaacacaaagacacagcagctcaccttagaagaaacattgcatccaaaacagggcgtatgtctatgcgcttatagtctttttttcttactgatcttctatagttgtgaaaactcaaagtgcaagtaatttctcaagttccaaagcttagttctacttagacttttaaaatgtttgttctttcacccacattaaaaaaaaaaaamaaacctcagacattttctttactaacattaaacttcgtatctttcatagtagagccttttgtttttttcttgtgggagtcctacccgtcttaagggactctcacataactcgttttctgtttcccagtccttattctcatacaatttcaactttcattttttctcagtcgttgttctcatacaagttctctataactaattggcccttgaccatcactggacattctccaaaatgtcttttcacctgctcccatgtggagcccaaggctctcaggaaacaactctgtctctgcttccaaagcaagctttcaacttccaagagaccatagcaaggactgaaaaaagayactctttattgagttgcatttttatttcaaagtaaaattgggattttagcaccggaatgctaagtgtgtacttagagggatgccatagtggatgctggggagggccttgaagtcagggaaaacaaggttcatattttgactgggccaattagtagctacgctgcttgatcctgagccagttgctttacctctcagaaccttggttctcttatttaagatgagaagattagtatctacccatgagactgttatgaagatgaatatatgttaggcacctggcccattgccctctgcgcttggtcaacagaagtggctcttgttattgtgaacttcaatatgcatgacctatctgtcagtcacttaacatgacttttttttctcaagtgatttttatcttctataacattctcttctcattcttccaaaaaggagctctatgaaagcaattaggggaasgtaaagggtgacaaggatggagggtaattatgaagaactacagagttcttttcatattttgtacataatatcatttctggaaattatatccacattaaaatatcaaaaaaaggtattttcactgacgaatggaaactgtcctgatgtctctgctagttttaatgcccctagacacattatttaactctcctgatctcagtttctttgtttataagaggagtagcttgaatgccttcatctgtttaacatttactggagaaccaaaaataatcaagaaataagctgtcctgaatgagtccatagtcttctaggagaaacagaaaaaaaacaaaaaaacaaaacaaaaaataattgttaagttaatcttggragtgggacaatattgacgagagtcttcccagagtacccatgacttggagagtcactgaagtttgccagaaatgcaagcccccaggctgagggatctgtgcatgcaaaagcatggagatgagaagaagcgtggcttgctcaggggttcccaacatattctgtgactgtcattgcagctcagggtcatgctgctgagaggtgaggtgygaaaggtgattacacccttgaaaggtcataacaatataggaaggagtctgcaaccaagtgatttcaaaaatgttcagaaaagtcatggaaatcacttcctacaattcctcctgaaactccaagtacctgagggaccaaatgagtacgtctatgtttatgtcactgctgggaacagctttcggggaaaattttaacaatgctgcaagaagagattggaacaaggctgcctagagcctgatgtaacccagcatcatagggatgactttacttatttatgtatttaattgtaaaattataaartggtagtggcagtattatttgtcatggtttttctactgtggctaaacagtttgtcattctttttgaaaaaacaaatgttgggcacaccaccatgctttgggagtrtagatgaaagtgaaggatgtaagcattaagasattacatgaatttgcagttttggctaggccttgggaaacattagtctttccatcgtcacagatgcagcaatcagagtatttggctttagcttaaaagttcatgcatgaagcataatcagaactttattatatatcacttgctaaaaaaatttccttaacagcaggcactcatcagtcctctaaacttcaaccagtggctcacagacacccctgatttaatttgttctttctctcatgatccctcctcccttcactcattcttttattccccttctcttcctctttccttccctttttcttcccagtcccccttctttatttttctgccagtttaacagagtatttttatatcatttttttagtattaaactgcacattttaatatcataatagtctttccatagagtttcagagtctagatagtgctttacaaggatgatggtgatagcaaacatgtgtatagcacttaccatgtgccagacattcttcggaatgcattactgtaaacattaactcattcagtccttccaggtaggtactgttagtctccccatgttacagaaggtatgttgaaccacatgaaagttaagtaacttactcaaggtcacacagctagtaaatggcaaagctaggatatgaacccgtgtagtctgaggtctgggtaatgttctgaccactataaatagttgcctctgagagttgatttcctttcaccacagttttcaccrtggaaaatttgttgtcattaacttatctgttaaggtgatcacatagtagtcaggtgaccccaaggaaggattattgtcccaaatttctttttgttataattatattttatttttgcttttcaacatcagagacagtctatcaacaacaacaaaacgacttagttttaaatgatttggataggaacctttatacccagccacccgcttcatgctcttgtttaatttttattaaaaattagcaagtttgaagatgatgaaaggattatagtttatatctgaaacaaatagcattccatcctaascttgtcaaacagaaaaatatatttgattagttgggctagaaataattcatcagattgattctataactacctatattatagtgactgcctttgacttctgatcttgatctaggtaaataaaatcaaggaaaaaaaaagcagatggttgatgggatttaaaggtgtaaagactcagccttaactctcacaggggatagttggtattgacttgtttcttgttttgacattgtcagttatagaccagagtctacctacttgtctaaccctgaagattaaaaaaaagtgagacctatactggcaaggtgcccttctcactacatatcacgagtcagattccagtttcatttagataagaccaatgaagaaggggaaacttgctcaccacaataaattatgatttataagtcttttaatatgatacatagtaatattcacctttaagattctaaaaacaccttttcatatatgcaaaatcctttcatgtttctgcaacttaatttcatacaaaagctgctaaatgatttgaaaagataggagctgttactgtacaatcagaagatgcttgccgtatttcaagatggcaggaggatacaaaaccactgcctacctacatttatttccattagcttaagaatttattgttattattgttttgtttgcttttgctccagcttttagttctgttaaaatgaacagtatgtcaggtggcatataacttattgagccggattgacgaggcagaagctcaaacataatttaggtgattggactggacgatctttttagattctttctctcttgctgaaattctgtttctctggttattatgaaacatgatttaatgtaaatgtaataacgttcagattctgatgtcaggtttccctttttgttttctcaatgctgtgtttcccctactcccatccctgcaggcttaggtcgagtctcttctattgccgttctacaactcaggagtgcctatgtggctgcagtgattgagaagctataattagtatagttaatgaacaatgaaatgctgcctccctttttattaagagcagttagggtgctgcataagggaaggtagaagattttaccacccactaccagtaattaattgacctccttgtcatctgttgagacacaaggagaataaaaattttcagtctaagtgttagagttggtggatgttgccgtgcaactgggcattgatttccatttttgttctttttctattccttctgtattgatccttgttgtcacagctcaagaaatcatcctattatctttaaaaaatccttcataaaattttagaggtttaagtttaaattcagtgtcacaaagtttctactgtgaagttatatttgaggatttctagaatcttctaacctcgttcactgctgttattttactgtagagaagacattttcagggcagttaagtgacgtggctgaagtctctgcaagtttacatctaacattatgcaatagatgacattttctaagtagactccctagataaaaacaaacacataaaaatgttttctgaaaaataaacaaccatcatattacctcctaaagtcatgttaacttgaaacgttaaggatgtttgtttttctatgtgagaacccaaattataaacattacaaggattgtgatraagtaggaattttacttatgggaagaaataaggcagttttagggagaaataaacttgtgtgatatattttatatgtttttcttcatcattttattattgcaatatagttcacatataaaatttaccytttttttttttttttttttttttttttggagacagggtctctctctttcacccaggctgaagtgcagtggcaccatcagggttcacggcagcctctgcctccacaggctcagatgatcctcccatctcagcctcccaagtaactgagattacaaacacacaccaccccactggctaacttttcattttttgtagagatgaggtttcgccatgttgcacaggttggtctcgaactactgggctcaggctatccacctgccttggtctcccaaagtgctgggattacaggtgtgagccatcacgcccgggcaaattcaccatttaaaaaaaaaaagttcagtgaatgtactttatatttaaatattaagtgggtatattataaagaatcaagaagaccactgggcttttttttctacctttggtgaatatttgtgtttcttttgtttgtattgcttttaaacatttgatggagggaaactaagggcactgaggagttgtttgaaaatgccattgtcaatttgggccaaactccagcttgaggcttgagtacaaggccaagattagggtgatacaggtgcctgtcactgtgtatatggcagatttgattcgctgtttgctgtgttgaatccatggcattgcaagggattacagggtcttcagttttacttttgtgtcttctgctattatgaaagcttcttcatggtgtctcgtttatcaggatattcctgtgactagcatggtaaaattttctggaattaatacatgcataagttgagagaaagaaagaaagagagagagagagagaagagaagagaagagagaagaagaaagaaaagaaaaagaaaaggaaagaaagaaggaagagaaaagccagaaagaagagagagggagagaaggaaggaatgagagaaagagggaggaggttggttttctctgcatctcctgcaaaagagagaaagaaggaggagyctagtttgctctttgcatctcccactttccaagcatagtcacatgatatatagagagatatcatttatcaagtcatgaataagcatgcttcattaggttataactcttaactactactgtgctgcagcagaagtcttttggagacggaggaacagcaactttatgggcatggtcctctttctaggtggagaattcacctttggctttccttggtggacctcccttgggcaacatattgccaggacagtgcaggacatcaagctccctgacagtgatcctgtacacagatgaggaagacattcttytgcctgaaataaaacaacaggggaatactgatcacagaactcacttttcctacgctctcagtgtctttatattttctttttttwaaaaaaaaaaaaaagaaaaatgatctgtagtattcatgtctcaaagctaactctgagggcaaagggagctgtctttccccaaagctaaaaatctgcctataaatttcataaagactaccagcttcagtatttatctctccacagytgtattgtaaaaatatttgcatgaaaagaacatctttgtttccttaagtcttcatctgctcttggtactcatttgctcttgaaaagggatataatckttttgtttttgatctataatcattcccacagcaaccaattgtgatgccacagaccaaggattataattttcgctggagaataaacagatgaactttgaaacaaagctgctcatttctcccaaatggccttgagaacaagaagaccaattctaaaaattttagctacaaaaaatttaaaaataaataaaaataaaaattttagctacctaagaaacaattttcaagatcatgaatgctccttctttaaaagtctatataattttccagctttatattcagctcatctcataaaacagatatttactaagctcttacaatgtgccaggtactttgctagactctgcagtacaaaaataaatgatgcataaattttgcccttgaattctgagtccaagggttcctttagtktttttatccaaacttaaccaaagccacaataactagaatttgtcaggattttggtatgcagctatgagttttactccatggttaatgggactggcatttttgtctacgtttgttacatgtaccatgtgaggggtgatgggatttcttctttttctgacactcaatacatacaaagatgtggaaattcagtaggtcagggcagttagtgtcttagcaactgtctaaaatgtgtgtttcaaagtatttcctaattttttaaacagaaaawtcaatccttcagactctcagatttttggacccgctgtagggaaaactcatgtttctctttctcatattctgttacttgaatgtatgtgaaataagattagggaacagcatttgttctctattatgcttccctggcagaacttcttagggtttctctaagctgtgggagcagttaacaggcatagtattttgttttataatttcatccaaaattcccctagctggatgaaatatatgcccccccgagaaagaaatatgagatgccaaagaatcatatagatatttttcttttcttcccttattgtaaatcattggttaagatgacctgcttatattttaatatttatattggtaaaagaggctctatcttgtagagygtgccatttatgtttgttactttacccatattgttatttatgaaattgtttaggctttttgttttttgttcgctatattgtttggttttcaaagcatacccttgaaatggagtaaataagactcactctgtgtaaagactgaatctatcacttaataagttttcttaataaacaataggtgttttaaatgacctcaaacatattgtctttttcagaataaaattctgtttacttttattgaatagcttgattaataatattgtttttcttttcttttttttttttttttaattttttggagagtgggtcatgctttgtctcccagactggagtgcagtgagatgatctcatctcagctcactgcgacattgaactcctgggctcaaactattctcctgcctcaggctcccaagtagctgggactacaggtgtgcattaccatcttttgtgatgagtttttaaaattttttagaaacgatgtctcactatgttgctgaggccagtctcgaactcctgcctcaagtgataatgcttttgattttgaatgaaggagccatttttacaaggacattatcaccagacagacatatataaatctcctagcatgggtatatttactcaaatttgcctactattggatctgagaaggtatttttattcttccagtatactctaggccttgttcaagttgtacaacttgaatggttcatagcttagccaatgggttattttcagtaattttgataatcagtataattgctgtaaagtctatgaatttacagctatcagcattgatagaacatactcgaagaatgcatcagtctgttatcctcaggtttgtgatcctggtatatataagactacgtgtaattccgaaagaaataagtttcccaaccttgaaagactttcacagaaattgagacaagaaatgattaaaattacaaaaaaaaaaaaatgtattttacatacattttacatgcactgggctagccattttctagactacacagatatataccagacagtatttccattgagaaacttactatagagttggggaaataaagaattgtcaaatgaaaagataagttatgrtaatgaattcaaacaactttacaagaagaaatgctacaaggctaaacgtagctagttgccaaatggatgctccagtctgtaacacatgatagtggcacacatggaagcatgtaagagaaagctccaggcagtaatgaattgggagagtgggatttaagctgaaccttgttgaaaggaaggtagaatttagaagcaaaaaaaaaagaaaaggataagaaagtgctctccaagcaagaaatattccagtgcaaaaaagtcagaaatgagaacctcagacatggacagaggaaaacagagccaaaggctggaatttaaaattattcactaggactgattatagccaatccaatatttatattgagttggtatgtaccctgagcaccacaacatggcaattcctgactttaaagaacattaaatcagtacaggaagcaacataatacaaaataagtcaaatgtagacacagagtgcaataggcattcaaaaacaaatcaccccaaaacatttaatactctttcaaagagaactaaagctagtttttgaaatttcattgttagtatatctgtgtatttggattacagttactgtttcagctttttctttggacacaagctataattgtgagctttctgttgtattttatttaatgtctactgcatccccttagtataaatatgcctctttcactggcagcctacattttgatcttgtagctgtctctctcacagtagttaatagaatacttgaaaaggtgatggtaatacaggatgacaactgctatactttttctgtgttcagactcagtaaactatggttatgtagttaagcaatgcagttctttgttaatgacagatttattgaagacaagctttcagaagctttcagattctactagaaatcctattaaagtgctatccattaaaccattagaatagtcattaaaactgttagtgtagacttgtttttcatgagttattggtctctcaccattcttagtagtttctgccaatacagctctaccctttgctgcattatggctattcagttctaaggaatgaatgtgcatcagctttctctcttttccygcagaatttatggtgtgtgagggttttggggcagcactgttgggtgtgtagaaaccagggagaacttgagatgtgtctttttgttcccaattattaaagtaaagattatacttaacttcccactcttttggatttgataggagtcatgttagaatctaacgatatattatagaaagctgtggcttgtctttcattatcaaaaaattttggcaataacaactgtgggatgaatgcatcattaagccaaaattggcagaggtatctggtgtttaatctattttccttactgtccacagtttttaaataaggaattatgctccatgataataaatttataatttacgtatctattagagtgtagtagttaagagctctgtcttcaaagtcaggaatctctgcatttacatcccagttctcctaatttatggaccaccaagagtgactcatggaaagtatcttaacccttctatgcctcaatttctttatctgtaatatggagataacaatatctaagatacctctaaatttgttttaagaattacatgagattctgtaagtagtgataatccacccctcattgtcatcataatcctcaaaatcagaagtaatttaacctgattatttctcactaccatcctttggtgagtttagagtaagacagtctagtcttgtgttggcccttcagtattctttcctggtcataaatctacactgaagttaccttcatggaccccaaaagccagctgaaaaattttctatggatttcacaaaatcccctccagagtgttgagtcctacagtctgctccttctgcctctgacatgacaagaggaagtcacatgtgcagttgtgaaaagtattctgcaactctcttttttccctcttcctggaaagtagttcaatgttcataaatggaaaaattaaagaacatggatagtaaacataaggaaataaaataattgtcatttatcacagctcagagataactgctgatagcattggtgtataacattctaggtttttatatgtgtgtgtattcatgtatgtatgcagtgcatgtgtatacatatgtatatattttaacaaaagtactgtttcatgttttttctttaacagtaaaagtttatctttccacgtcactagatgcataacaattttaatagcttcacactttttcatataatctrctattatattaaggctatttccaagcttttcaaagttattttaaatgattgtatacatgtgttcaggggaaatattttttttcactttyaaggctttctgacagagtttagtatctgaagtctaacaccaggaaatggatgaatcaaagactgacttcacagtggggtgaattgagccaggtagagaaggcaaagtgatcccaagacaggcttccagaccttgagaataccttgatatggtcactttacaacttgcttcttagttctaaaacttgagagagatctgttttctggaaacctcacttgcattagttgtgtggtcttggtggccatgtaatgaagctgtgacgtctaaatgctaccgtcattctgagaggaccagattttcatggtcrtcgtcctccctggccctccattgtctgcatgtctgtgscttgctttctctcctactaactgacacagcatttttttagatatgttaatacacagatttttaaaggacatgttaatttatgttttactgtttagattatattacatttggagacacgtatcatggttgaattgtgtaatactcaaacaataggtctatggttttacttccaaagcattaaaaattaaaaaagaaattatgacataattacatttaatattccaatcacagccttaaatattataaaatattataggtgatatacaagattaaaaatcatgtctatagaatgaattatcagtttgtaaaattagttcgtttactttgatcataattgaatacatatccaatcacaattgaatacatatccagccagcttatgtactgcacattccttccatctccaatgctgtcttagaaggaggaaaaagcaattatcagaaagggctaaattgttggtttgttagagagcacagtaaatgtgtgctgagaaacacattctctgctttcttcctttttctctcttgtgtgcagcaccatagttaaggtgaacaagggtgaatcatggtaaggtcagctaccttctctcattctggattcagtatctcattgctgcatcaatagtgttagataattggagataggtattgcactgcagaaatttctctttactttttcccacccacctatccatgtgatagtttgtaagtgtacttactttttagcagagactgccccctgtctgtctgtctctctctctctctctctctctctctctctctctctctctctccccctccctctctctccccctccctccccatccctctctccctccctccctccctctctcctgctcccctgcacgccttccctccccgtacatgtacatgcctgactgatggttatgacactgtcatgaagcttgcctagatatagatgtgaatatgaggaagttaggtagaaccagctctaccttggggtggccatgtaatttcttgcctaaactgggatactttgagagtgagaaagggtcctattaataactacgctgggacagtaggtgtaaactgggatgtagggactacctaactcaaactcagcctattktagagctccattctggaatatttatccttccatctgatcacattccttccattctccctataactcccaacataagtggccttgagatctttggggagcacaactgttcaaacaaaccaaaaaaatgaaaaaaactattgtattaaaatagccaactaattgtataaacccatactgctgtgcagaaaattgggtaatacagtttatacagaactgtcattggcaagtagccattatgtgttacttccaaatattaagtacatatgtaaaaattggaaaacacagtacaaaaggctgtcacaggtgatagcttagaatgaatttcagatgcacaaaaagtcaaagatggcttttatgaattgggttgtagccacttgtgagctgggagccattctgtttatttaaatttttttttttatatctctggtctattccaatatatatttgtttcatcatcacacctttggctgagaaatttatttaactagttctaaggtactagggtaaaagtaattgttgctgtgtatcctacctgtaatgtatcttagctattcattccacaaatacattttaaaattcactgtatgctaaatacaaaatatacaacatcagataaatcacaaccccatagcagtgttctcaagtgattccattttttccagaggtctaatacataagatcatcaatgtactgattttttttctaatatttaacttagaagagtccctaattttacaatgtaaaactaatatacatttaaaaatactaatctttgagagtaatcttttagtttagaaagatactaaactctaaaattctagattgtgttaatttgttctagcctttctagttttatcacatgtaagagacaaatatactgacactttagattgtaaatactttctaagacacctgagcaccatggatataagtattaatgatcatcctgtgtgacttctttgattagaagcctatatttagtatggtgtattgctaccttacctgcaagcactaatggtattaatggcaaggggttgttggtatatatactgtgcccaaaaggcacatgtggatagtcatgttttttagtgagatagttgtactaaatacatttggtatgaaatggggtacaagagttttttaagtgattatttgggattttctgagttccgacaaagactgggagaaaacattactctttcttatttcattttggatgtagaatttttatctctttctgaatcagaaaatgagatttgaaatgcattgactgaacattaacaaaagttaatttatgtttcaatttagaaattcatctgttccctccacctgcatctgaaactaaatatggaaaaagaaacaaagacttaataaagaaactttctgttaaatgacaagcaaagcaatgatgaaagcctaaaatacatctatgtttaggatgcaaagtaaaaataataggaagaaaaatcgtatgtttaaaattaggctagacattttcatatttgattaaaagaattactgttatcacttaagctcaactaatccgacttttaaaaatgaagatgatttatcttaacaattttccttatagtgtttcttaaatgatgttgtaatatcagtcgcacaacaattgtgaaaccaagctattcattcataatttgttttttcttttgaatctacttatgtactgagttttctgagtggtcaagtttctattatatgaaatgcaaaaagtgagaaccatatgcagctgtgctcttttttgttgtctctgccggaaaagtaaatcagtttgcaaattacatagatgggcatgttatatagtaagtaggagagcagaaatagatttatttgttaaattgagcagttgcctcagttttatacttcagtatcaaaaaaggcaccgttagcatcaaggagaatgcagatattccttggaggctaagatagtcttctatcagggatgttcttatacaagtcacagggtagaggcaagagaaggcaaaacatctagcattcttttagtaataactgtgcatcaggtacttttcgcttaatactttgggatctatacagatgtgtcagcattttcaaagagcagtgaggaattaatgcattcatctagttaatttggtggcaaaaactgggaccttgttatccatggaaaagaaaggatgcagctgtgaattaattcttcctaatttactaaaacactaatttactaacaccgtaaattagtgtttaatgctgcacattgattgtatttgctagataattttgtctgttacctatactcaataatattctctttaatgttgccatactctttaatgtttctaggtgtgcataacctattttaatattttgtttaatgagattgggtcttgctgtgttgcccaggctggactcaaactccagggctcaagaagtcttcctgcctcagcatcctgagtagagtaggtgggattacaggcacatgccacctcaccaggatcctctttaattattaaatatcatactttataagtgatttgcagatcaagtgacttcttcttataagtcatcgtaattacattttaccaattcagtcaacattgtctatttaaacaaagcagtttaataaatttctaatacatttgcttgccccaaactgcctggaaattctttaatactctttgctttttcaaataacatcagaaattctaatctgtgaattgtatttgtaaagtgatttccaatgacacattctattcttaagaacatcarctatatagaattcaaagatgtgaagaaataaaaaaagaacatcacctataaatctgtccatctctttcttattattcaccttatctgatgtaggagataaatagctaaaaatgaaaacattaggattaacacatatcgctgatcttattcctctagcacattgtctttggaaactagaaatgtctttcttctgcatttagtaatattcaggaaaatgtttggcatattaaaaagccatgtatagtgttgggtgtagtgactcacgcctgtaacctcaacactttgggaagccaaggcaggtggatcacttaaggtcatgagttcgagactagcctggccaacatggcgaaaccctgcctctactaaaaatacaaaagttagccaggcatggtgacacatgcctgtaatcccagctacttgggaggctgaggcaggagaattgcttgaacccgggaggcagaggttgcagtgagccaagatcacgccattgcacttcagcctggacaggcatgaccctgcyacaaaaaaaataaaaataaaaataaaagataaataaaaaattttaaaaaagtatatagtaaaaaatctagttatttaaatctttaatcttaaagttgtatgttcttttttggattcttatttggaacgatctctcaaaaataatcttttctacagtcacacactaaaatagtaaaacactttatctgaattctagagagtacctcatgttggcctactgagttaaaaaaaagaattaagtatttttggttttgttgttgtttttcatcatttttaatccacgttagattaagataattctaatatacttctgggaatcaatggtttcctcagtgaaataaactaattcatctttagtactatgatataatttagaataaattgtttatcaaaagtttacctcagatatttactcacttgccatggatgaatgatttactatgagcatagtttatcctttttgttccctgcatgtcagttctaataatatatattattactttaagtaattttctrtacgtatttgttatatagtatgttagagtcaaaatttcaaatgcaaccattagacaacaggtaaagctgatgcattttatcacttatctgaagccagaattttaactgtgtacaaaaatatgtgackgaaacactttttgatgacttcaatgagtgtggtatatttatacattttctatgccttttctactactaaaggtggggcactcccacatccattcatttgttaatactgagagtcttgaaaaatctttatttcaatccttcacactctaatgttggcctggatcagaggtgctcttacagagagagactcagtaagatttgataactaattggacaaagagagataagagaaaatgaggacacacacctgacactaggttgacattaagaggaaaagggaacacagagcaaacagacccaagttacctgaccggccagagctaaccaggggcagccagaaagctaacaccctgttctctgacttccagattttgttcaccactggactttccactccttcctcacatttcagtttctaaaacatcataggattcaactgaactcatgctcttctctttgaagaaagtattcattatgccaattgcaggcttttactaattgtgcaaaatatagcccttcccatctatgcaaacgtggtcttttccaaatgggcatatattaatttaccattttcaaacagagaagagagagacaatgaatgagaattttaaaaggcataattgcagaatacacagtgaatggtagattgctcttctaaacctcagaaaggacttgagaatatctcagagccaaccacactaagaaccaaatgagcctactgaaggggagatatgtgaaaagatactgtttctttggaagttaaggtcattgaaagttcaattccctgtaaaaagaatgsttagtctgacccatggtttgacgagtgaagtaactggtctattccttctatataattaaatttttgttagttgttttaaaaacacacaaaaacaggatgatctttttttgtggtttctctttgatgagtttctaaagggaatattttgaggtttttctcttggcgggatgagggaaagtgaaacacagagcaactagtattgtatggtgttttgcacatttgaattatatttttcttctgggtaaaaaggttgaattttgcagaatgattaaaggactttgctttaagataatgacttcagcattattgaaaaaggttactcccatatcaggatataattttacttggtgactgtaatctgatgtgcaaattgatgatcactctcttgtttggagtttagaattacaaatagagttcagcagtactacacagattgttcccaaccttctgtgcgttgtgtttcaagagaatagttgaaaggcaagtgtgaaaccttcaaggaatcttctccagcttaactagagagaaagcatcttatggtggctgggccctcagcctccagggccagaatatgtggacccccagcctggcctctctccctgctagctgtttgaccctgagaaagttatttgtcttatctatacctcagtttcctcatctacataactgtaatcataatggcaactacttctagggtctttgtgaagataaatgagttagtatgtacaaagcacaaagaaaacatagtaaatgttatctaagtattagttacaactattggatatatttatattttaattctgagtttttgtcgagaatacaatgcaaacctctaatccatctgctatagcttattttttcagttacctagtttgagataaacttctagttgatcaaataaaaaggattagaactttcagaccatcaagttamagactaaataaatgcaaagtgttttatattagcaagtatctgcttgagactttcccgttgttctttaaatcactcacaataggattttttcttctattgggtcattttttctgagtaagcaaagcctttgagttgaagatctgttgttagcrttagaaaggtttagtcaaaagctgcggtggggaggaggagtcaagtgcccagtgtgcaggcagggaagcaatgtaaaatggtgcggcatcttggtaaaactttagacgctatatggggttcatccaatatctgtctttcaagaggctttttgattggctggagacacaaaaaatacgacgaagtagcatttttgtgaattctgtgataatttatgtatttcgtatcatgtataaaagtgtattaatcaacttttacttaaataaatctagcttgctttatttctaacttgcaaaattctccacaacggagactgaagaaagcctggccaggatttcagcttgggaaggtaaaacttcagattgagtgctgggaaggcaagggtatcccatggaagattatttgggtggacagagttgagtagacatatctaggagtcaagctcaggaaaaccaaacactaacagcagcagacccaaaagaaggaattgagtccattaagaacaaaggtgcttatttcaaattgttttgaataattaatatttgggtaacctcagcttagctttatagtaaaaaagatgcatggtcagggtggactgaccgaaaatacagggttgaagtgaaagtcaacttttacattcctcagggtctacattgctctttcttcattttggccatctcactcttccttaagaggacagcagcaagagaagcctgagaacagagaggcaaagcaactgtgtctgtcaccagcaattagggtcttactcattcatgatctctttgtcttagtaatatggataactgaaatttgattttcctcaaccagttttatgtattttttgaaatatgaaagatcttagtatacctcaccaactttcagttgttattctttactgagtttactgctgtcagcattctgacaagctccaaaaataatgacccgtgttgtgttttgttaaacgttcagtcagacagatagatacagatggatgagtgctgtgttgcacaaagacaagtcagcattatttaatcaatgtttgtttgatccgtgtaaaacgagtataaacgtaagctgcatcccatctgttttatcatccatgtgaagccaacctcatttttaaaacttgatttcttatgtaattgccccagaatgacacaggctgataagttgggaagaaatatcatttggattggtgaaataaaggatagtgatgtgtagrtgtgtttcttaagttgggcttcttccttttgcagtggcattctggatagttaagtagtatcatggcttagtcgttaccagctgttaattatcagttgagctttggaatcacacagacctggtttgagggtaactgtatgaatctagctgtgtgagcttagccaaattacttaagtaccaagtagcacagagcctgtcacgaagtaggccctcagtaagaataattaaattaatctttctttacttcagttttctcgcctgccaaatggaaaaaaacaatacctaccttgtaacaattgtgaaaatcaagcataattcttcatataaagcataatgacctagcacgtatttttataattatcctgttatttgttggtcttcatctcatgggccacactttgaacctaagcgtattatctaacataggtggcacacaactcatgtttctgttactcgtttttaaagtcttcaatgtaggtatcaagtaagtcctacagaaggctgaaaacatgtggcaagagtggaaatggacatgagttaacagtttgtttcagttaatagatgcaatttcattgctataagtaaatgcatgccatcttatacatctgtgggtgatcttagtctaagtaaaacaaggatatcagagggagcactgtacgtataccagtgagcttagtagcttcttgggatgtttaaatgatgtgtaagaagcttatgtatccaataatgttcatcagtataaagtggaatagcagtggtagttataattccatgatcacatacttaatcactaagccatatgataatgggtgttaagtatgataattgtggtatactgtacaatgaagtttccataatttgttctctaactctcatgttatatagaggaattactctatgatttctctttatgaacttttctcaaaaacatttattcatcaattctgttcatttgcttaaataacatctgttggaccatttactgagccaggtgtagtgtagatgcaaagatgacgaaagctgcataggtaggaatttagaatttaggctgtaggtcacacagagccagtggaagttattaaacaggcagccaacctgtccagagctatgctttagaaagacaactttggcagcagtatgaagagtggattggaataagagattagagaagggatttcaatcagacaacagataccaatgttccggatgtaggaagtagcaatgagattgcaaatttgagagatttttaaggcaggccctcatcactgagtggagctgttctgtgtggacatggttcaaggktgacttgaaggcttccaccaggacatctgaatgcttcaataccttcggctcatagcatgcttggagataattaatttctgcaagggagatgaaaaatttccctggaagagcaaactagaaagtcccttaattatattagttttcagactctaaggtatggataattattaatattttcctgaatactgctcattgattgactattttrtatatagattaacacaggctaagaaaggaaaacagtttaataatccttagtaaattagaggctggaatctrtactgctgagaattttagaatgcttggaggctattcaagactactaacagacttgacttttgacacttgtgagttttactgttgtgataaattctgtgccttttgacagaaagtgtgcacatctttagtattttgatgctgttgggggtatgttttactcccaacttctacatatacacataaaggcatgaaaaatacccggcatcaaaaataactgctaaaaattatgttaacataatagagtatattttwaaaaaattacctgggtataaacctgttttatcattcttgaaaacttgattttgatcgtttaaaatcatgtttgtgtmattaatgaacttgtgtttccatataacaatgaaattataaatcttaaatgttatcagtagcctatgatgaaagaaaaagtattttgatttccataacgtttcaggaaaygaagtcccctagagttttatgatcaaacctgaatttggtcttgaaatgatgattctacttaaatatttttaaattacatactttatatacctgtttgatgtttattttagattgttgaataatttggttgaaatgtaccatcaaagaaagggataaaatcagaaaaaaaaactaatgttaaaatcaagaataaaaagcaaactataaacataataacacataataataaatagaaaatatataatgataaatagaaaaacaatttatatgcattgggttgtatcttattcatctgagtattaaattaactgacctcccttctwtactgttcgtgttaactatttaaattgtacaatttgccttgtaatattggtcttagtgtgttacagagaaacagacaaaaccttaagttgccattaagttgtsaacatgtagataaagaatgaacagtaaagcctgtgtccattgaagccagtgaaagaccagttaacttaaagactcagcttaggtccagataggaaagaatagggaagaataatcaatataaaataaggtttacagaaccggaaggaatattkaaccaagatgacttgtaaactacagcagcagagagggaaatggaaaagtaaaattaagaacctgcctttccaatattaacagaacatctgtattgatttcttttttcatttgaatcaatgttggtgactatcactgtttctgcagtgattaaccattttttgttatgctggttacattagtgttcagcttcacagttaggatcatcttgatgaagtatggcttcagaattttccttttaaatcatgtttattacatgtgataaatgcctataatctggtggttttcagtattgattttgtgtatatgtgttgttttccttttaaagtcaattgaccctggccagcagttcacttgggaacattcaaacttggaagtaaacaaaccaaagaatagatacgcgaatgtaatcgcatatgatcattcccgggttctcctatcagctatagaaggtaaggaaatgcagacatcactgatacctttattttcatggatttgagtatgtgcatgagaatattgttttagtgaggttattaaccatctctgaaagtaattaagatggctgtgcatggtggctcacgcctgtaatcccagcactttgggaggctgaggcgggtggatcgcctgaggtcaggagttcgagaccagcctggccaacatgctgaaaacccatctctactgagaatacaaaaactagccgggcatggtggtgggcgcctgtaatcccagctactcaggacgctgaggcaggagaatcacttgaacccaggaggcgggagttgcagtgagccgagatcgtgtcactgtactccagccccagcctgggcaacagagtgagactccatctcaaagaaaaaaagaaagtaattaagattcaaacatagctttttcctrctttttctttctcacacaaataaattatacataggccacaatatccctgacaccatatgacagaagtgcatctctcattaccttcttgcctttaccctaaagatttgataatgtagttgatgttttatatgggaagcgaattgaggttgcccattttagtgatgggttttggttgttatgaatgaacaggtgattgtcagaagaggcccataaactaaatggttattttaaaaggggagaggggattgtttgcttgtaaataaatctggatatccactggggactgtctaaaatttcaaagttgataatgtggtggttaatataaattaagtatgttggaaatgtctaatttatctaatttgtggactgcttggtaatctgcctcttagaattgcagtaaggagtgtgttccagagggcatgattgttcctaaaagatgagggttgctcctcaaatctatccagcttcattaaggattcatgacggatcatttttccaatgataaatcccttttgtgtggcatattaaaacaactagaagttcatcttcaacacacagtatttcattagttactctggctacaggagcacattggattggaaagtccttagaaaatagtttaggaggccacttaaatctgtccctstaacagtcaacctgggtcacccttggcacatgccatgttcaccctcattagtgcccagaagagttttatggcctcttcatacttgaaggttcactgtttacattcttgaagatattttagaaaacaaataaattatagtagcttcagacccagttattttaaggactttatagttgaaagatgttcatctgtagttgttcgagtacctgtccctgttttctgcttccaaaatctctgctgaccaccgctttattttataactctgaccacatctcctacctgcttcctcaacgtccaaaatttatttgaaagtgaaactgtttaaaagctttctcagtaggcaccataggccattaatacatttgtttccagtttttttgggaagaaaaactatctttcagcatttgaacaatcctatacctgtggccctccttacctcaacatggcattgttttgcatagatatattttgtaaaattctcataataaatttactttggatggtggaaaatactataatcccttttctaggcacccacagatactaagtgttcaagagttagcctttttccacactgaaaacaattatttaaatttattaaaattttaccaatactagatcaggcataataatgtcaaatgggtaatcgcttcttttcaaattctgtttaaaaactgtaattaacatatgtggatgattaccttacatttatctctatgttttccattttaaagtgtgaaaaaatacaggttttttttgtggggggtctcaagtctcttaaatcatctccataataaatgaaaaactaaactgagtcacaaatagcagagagaaatcttttttccattagcaaaagcaaggtaaattattgaaataaaataaatgaatgtaagttgagaatctatttggcatggtctcgcctggggaacttgtcagtctgcctctgctstattgtagcattgtttccactaagaattaggtcattcaataactaccacttygctgtacttttgctcactttgtcattatttttcttaacctgttattttccacatctttaaagtatgttgagggataaaaamtatacctccttgtatctttattctgatggttgaaaactatgcacatttcgttcctatgctggttttatattataaaagcaaaagcacttgaatcacacgaaaacctgtctttttatagtgctgtgttcacaaatacaccctaaatctagagctgacctaacatgttaagtgttatgcaaaaggttagaagcatttaattgaagttyatgagctatagagagctttcatctaaattacaaccgtgaacagcattttatcttaaactaagcgctaaccagcaggtattcttgagggcagtcaatcatcctgtatcttaaacacagaagagaaaatactggcaactggaaccacagaaccactaactgaggcttctcctctaaagacagctttgataatacagggccagcttttagtatactgaaatattaagtgacttcatgcacaatttataaaacttaatgtgcttgttttgtgttccaaccaatgttactaacttaagtgactttggttgagagttttaatttgggtgtttttgttctattctctcagtggtgctagttactccttacattattttgcaaagtgatctgacagacattagaacaacaaaaactggaagtggccgcagtgattgatgttgtctttatatttgtttagtagagcaagtgtatatcctacttccactgagagaataacagggaaaaattaaaagaatcaggaattgtgtgtgggcagtaatgtgcttattgaactttttgaaaatagtgacacttggtgacatctttccaaatcacagtcattttatttaggctaggaaaaatgcagaataaattcaaaagagtcctaattacaaaatggtttcaattgtttaattatagggtaagcagtatggaaacagaattgaatttttgacaaatccaattaccattggcatcccctctatgtttaagcagttcttaagagaaaatagtaattcctgaagaagagggcaataggatttattgtaatgagttaagataaatattttctacaaaaaactcgctagtatgatggtacgtgcctgtagtcccagctactcaggaggctgaggtgggagggttgcttgagcctgggaggtggagtttgcagtgagctgagattgtcccactgcactccagcttgggcaacagaaccagaccccatctggaaaaaaaaaaaagaaaaggtaaatattttcaaataaagaccaaatggaagctaatacttggatattggaagctaatacttggatgtgcataaacagaatatataatattatgcctaaacttgtagaatccaaagttgttcagaaagtatatttttatgaggaaaagaaaatggacaaaccaaaagatgaagaacaaggaaatctgaggttgggtcactaactagctaggtgaccttgacttctctgaatatcagttttcttagtggtaatctctttcatttctgacttctaagagttatctctatgtagtttccttatccgttgttttattggctgtacacaacagtctagtgaagcggcagtgtgagtattttactagatatataggtattcacatttatagatgagaaaactgaagctcagacaggattggcccagagtcacacagtcacacagaatataaataatataacttgctagaatccagctcttctgattcytggtctgggtcttccactttcccacatcactcataacactttcctaccggtgcaggatgtgacagtgtctkaagtcacttagcatgggtggaaaagctcagtcttatctttttgcctaaaaatctattttatcttttggcattagccttatggataacataaatattaggttttagaacttcatttcctatttcctatctcatttcctattttatggcatgactaacctgaggcaaggacacaatatgggaatcatcaaatgcatcattcargtggaccagagtcataagattgcagaacaaatgtcaagtacatgtaaacctaatgataatacaggtgatctgcttaccttaaatattgttgtatgtatctttaatttcttgttgaccaaggggtatcaattagtggcaggttatttattataatgccttctaattagcaaaaattaattattgcagttgtggataaaaaagaggttgttgttctaaagtataattaatcttcactgctgccagtactgtttccattagtaggatyataattaacattttgttttaaaagccctattgacatggatttttagaaaagtgttagccaagtctaaatataaagcaaaattaaaattctgcttttcaattcaacaacaaagacaagacattataatagatatgattatctggttatctattacatgccgagcaccatgttatggaggcccaaccccaaaagctagttgtcatgatctgaatttacagatgaggaaatggaagcatttaaaaagtcagcaaacttaagtatgatcaatagctaataagtgacaaattcaaaatactaatatatgtcagtctcaaggcagctgttcttcccattagtctacgcaggcccagagcggcttttgaaatcataatagccctgcctgtgtacatcaaacctaattcaaaactgatgcctttttggctgggaagattgtgtaagaattttcaaatacacattttgaaacacttaggatagaaatcttagaactagagatcttcagttgtgttcttagactccaagtcaaaatgaatttttccaaagaataaatgacacagaaatgattttcaggtgtgtttttttgtttgtttaatctcacgttttaaggtatattgggaaatatactgaataaagagacagaaaactgaaaactaaatttcagtttaaacaacaatgtgaccttgagcatttcacttaatgcagttaacattcactctttggggaagctggatccttttgataatttcacgaacatttaaaccccacttgaaaacatagagcacttacatactttatttgtacactaatttcagaaagttcatgcatatacaatctctttgcaagcccattctccagtttaggaagaacctatgacttagtgtctttcgttgttttcttataaaacaaggatgtgtaagaccatctctaccatctccagaattctgaacattgattctaaatcctgagatcaaaagataagtaggcaaataaatattaaatcttagacagtatgagatgattagcttcttcaaggaaaaaaaaaaaaaaaaaaaagctagtgggcttattctaaataggattattggctactatgtgactctcaccaaaacagatttaaatggttttatccatgagagggttagaagtgatgaagaataaacctagtatgtaatatgcattctttaacactagtgcttattaatctgattttttttaaaaagcttagtaaaatagggatccatgtcttagtccatttgtgctgctataacaaaataccacagactgggtaatttataaaccatacaaatttattcctcgtagttctagagtctgggaagtctaagatcaaggtgccagcagccttgctttctggtgagggcccagtctgtccacttccaagatggtgctctgttttgctgcatcccctgagggaaagaatgctgtgtccttacatggccaaaacgatagaaaaagggcaaacttaatctttcaagcttttttataaggatcctaatcccacccatgagggctctgccctgatgacttaagcatttcctaagacctcacctctcagtactatcacagtggtgattaggtttaacatatgaatttacgggaacacattctgatcagagcagtgtgttatttttttcttacagaaagggtcatatatttaaagttccaaaacataaatatatttattcacttcatctctttaataagtaaaagtaagtaccttcttaggagggcctatatgctgctcaggaacctctttcctgataacgcatccgaagctctgcttgcttctgcagagcttgctcggacaagttgctgagccttgctttcctcatctgtataatgggattattaatagtacctacttcctacaattactaggaggattaaataaactaacatatgtaaagcacctagaagagtgcctggcaccaagaaaatacataataaatattgggaattgttaagattatctttagtgttatgcattttattactactacagataggcccttttaagtgcagacaaaatttctttgatatgtgatctatggaaaaactaatatccaaatgagaaagctgcatatatttgaagtactctgtaatgcaaaakaaaacactggtgcttgataaatggaaaccagacccataagagcattacagatttcaacaggggcaagaatctattcttttaaatggaaattcaaatatatatcatctgctgtttgatttgcaaaacaggagcaattcaaaaaaatccaagcataaataatatagatgatgttacaataacttgattatttgtgagatgggcaatttagcacctttaagatgagaaagctgctcacatggaatcaccacctctaagataaatccagttaaaaataaataaataaagacaagaaactactgctattccttctgtaatgttatccaccatttgccaccacactagtgctctaggtttcagttgtgtcttagcctctcttctgcagagtgttctgtgggtaagtctatagcaattcatttgaaacagctgtgagcacatgctaacgtattctccaatttcacattgtacccatgctgtaaaatatctttttcttttctttttttgggcaaggggcatatctggtaactggatgtattttcaataagtaaaacaaaaccaaaaaaacctaggaaaatatgttaatacagtctatccaacattttctaatggaatgttagttatagtgaatataaatgttccatgtgaagttctaacatcaaaacaattacaattatttcacccaataaagaagtcctttgatagttgctgtgtgctccttcccatattacctcaataaatatgatccctttttctccctccggatttctctccctctctttcccagtcactagtgaatagtttgttggcacctcatgtttgttttaccttgctcttgaaattctatttaaggtactaaaggaaatttgttagaatgtatatcccatcccttaaaaaactcatttaaaaacaataaatcctgtccaattatttgttgagttcatttttctcacactcttcagagcataaatcattgatttaggctgataacatggtttctgcagcattttcagtttttctattttcaagttaatcgtttgcaactgtgatgaagtttaatcattttatttcgtggtactttttaaaaaaatacataaaagcacttcctttttttgagtagcagtgaatagacaaatttttatagcttaatttcttttaaatagaaaggtagatagcacttagcctgggaaacctggagcagtttcacaggttgcttgcagtctttctaagagctgtctaattagagctgtgtaaatggcatctttctcttacatgtagccaagcaagtgctgttatatctgttattccctagctcctaccttagactatacctgctgatgtttcttacccggaaaagagaaaaagcatttttaagggctggctggctgtgttgttttttgctttactcttgttctcagaaagctaatcgaagagtaaaatcagaaagctctgggagtgagtttatttttatctctattgtcttyagttcattgsagcttttttgttttttttaattgtacatctwtgcagcttactctaatgaatctacacttcattactctgaggccgtagataaacctacatcatctatggttctgtttttagaatatagatacaggtagcagattgctgggaaatygtaaaagaattatttttatcctgtctgatagtttttcttaaagtagaagctagaaaggggccttccagatttggaattactttttatcaggagggcattaagaataagcagactttttccatttttacgtcaatcataatagtaactaaaatccatatgacattttggaaatttcagatgtattgattcatttaattctcacagaggtgttggttccaggactttttgattatgatattcatattagtgatgaggagactgagcatctgagtgtttcctacacatagagcttctgtagtcatgtctcatgcttgattgttgactacttcattgcttgatgaacctctataataattgcctccttattagtataaagctaattggaccacaactccatgatgtggctgaaagttaagcttcagtggcctaaggtctactgtattttaaggcaagttgctgtctaaccaaaaagcaygcccctctatcacaggtgctggtaattccccaactcatgttgctgatcttgcaatgtattcaaagatagttcaatcagccgtctactttcctgtgtccattctcaaaactcagcctcctcagcagtgtgggggtatggaaaatcaagtagaggaagacatacattaatgaggagttgcaggttgggttcaaatactctgaatatcatctgtttctccattagctcactgtggggttgagctacgatgcccacagaacaggcatgcttttaaaaaaaaaaattctatgtgttttgyagaaacttggaaagactgcagctataccaggggataccctggcaaacaatagactgtgtctttgcaataaatgtttgckttatttggtatgttgcagaaagaatccttcatgtcaccaggtctgatgcagccacgtgtggctgtcattgaacaggtgaagggtcgggggaaaggcctgtgtcctttagaatttaatcaatttrcttgtaaatgtttattagattttgctttcctatttcctgttttctagtttttctggagactgcaaagtaaacatttttgccacattgttgtaaaattgcaatctaggtcttaacctatattaacagcaatatagtgttatgctttttcgtttgtgcgttggagtagaggaggggacattaacaaatgaaaggtagcttttgtgctctgtcgggtcttgagtacttctgtcttacaacaaagaacaaacttgtttgccaaaaagcaatttctttttgacacagtccttacttcattagggatttatagaacttaaagaaaataaaagtacctgggatttgaagccaaattgtgagttggagcagggtaagacgctcagctgaacatccatctccatctctgtagtgcagccgcatccactggagccacggtgggattctgccttccctccaagactgcctcttagttattatcacccsctaaagtccaaggagagcttctttccatggacagaccacctagtaccactacttcctcttgctttttgtttattttttgccccatcaggttccaatcaagatgtgaagtagcagcctcagtgaaaaatctcatctcagcacatcaaaggtagaagcaataggaatcagcttgaaagagcatcagagtgcgttcctacctaatctgagagacacaaagcctctatttatcttaaaataacttcacagagatktctgagtccaagaaggttaagaatagcacagacagacaccttattttagaactcaaaagaactggagggcatcagtttgtccaacacatcttgtttagcaaataaacaattacagttctgggcaagttgagtaactggccaaagatcacagagtaaactaccagcagccctagacaggagtccaggtttcctggtcagtttctctaaattcttagcaagtgcttgctattgtcccaagactttaaaatgcacacgtgactttacctacagtgtaatgtgatgcaaaattatgatccttccccttaggattacttgatttcacaaaataattcatgtattattttgcatcctgctttttcacttaatatcaggacttaaggctttattataaacccctcatcattgtaaacaccccttcaacaagagacatcttttcaaatcgaattatcttctggccccaaaaatcaaatccatagcaagttgggtgtttgtttgcttttttttttcttcttggtggttttaaaaaatccacatgaccccattattcaaagtctgtatccaggctcatttttccactgaaaactgtaactagcaatcaacagcaaataaaatgagagcctaaaacgtgcctaattctgttcaaatagctgtttgctatggcttgttgtgcatgaaaaacaacagaagcacagctctaccaatcattcacctcatcacaatctctgtcggctttacaggcttgcrttwacagccaggtttagttagcccagaacacaaagacccagtataaagcatgtaagtaatatttttaaatgccacaagaaagaacagttcattaactgaggaaatacactttaacccaggaatggagcatattggtataatatgaagttagagggtctagccttaggtttctcatgtgtaagattagaaggctaaacaattatttatggggttacaactattgacatcactgttattaattagagaatgcacatgaaacaatgcatgagaaatcatgaaaacccactcagttttataaatgcagtagagccatggactcctaggaaagaaccagtcttagaggtaagctgttcttgaacaaagacactaagaccaactgactccaagagagttcctgcagcagggccaatgtgttctaaaattttgcttatgaggagcagaaggcaaacatctttgtcatgttcctcctgttttaatagctccttcgccaaccaaaaaacaaacaaacaggaaacccaaaaaacaaatcaagcactgttattctagtattggaggaaggtctccttgactccaagaatgaaaagcaatcacctaatttatagtaattctatactctttcagtactacatttcaagttacatttccatccttcataaccccaaaggaattaagttaattctcacacacttctcttggattagaagtgcactctgattaatgttgcattagcagaagcaaatcattttttggaaaaggcagggaattgaaaattaaataaatatgcactacttagagaaagtcaccccccaaaaagtggaagaatgttagatccagcctcccagcagaaacatcctaatcaagaactactgaagaagcatttcatggcaccaaaacatttggaaagcagcatattgtttattttcacagtgttggttgaaaagtctttctaaatatgtcacattaaaaaccagagtctcatctacttgaaatggactgctgattaactttagcttccaatctggggttaatatttttaggacacaccaccatcctttctaaaattttttctccttcatctttctgcacagtgtgttatattgggttttatgaatacaggactcattagatcttagagcttctggagaacatagccatctctcttatctccacatttgcagaggatstgtgagagagaacttacctgaaatgtcttttcaccagagcgcgtaaagagatttgccagaaggaggctttcattccatgtactaccttcttacaaataggtatcaaactataagaggaatcttagcattattttcaggacataaagcattggcttaataatttgctctaccaggtattccattttgttttcaattacgtatttttcaraatattaattatttatcttttattgagacagagtcttgctctgtcgcccaggaatgaagtgtggtggtgcaattatggctcactgcagccttgacttcctggactcaaatgatcctcctacctcaggctcccaggtagctgggactacaggcgtgcatgaccatatccagccaagtttttagtgttttgtagagacagggtctctttgccatgttgcccagacttgtcatgtgctattctcaataaatcttcctgcctcagcctccccaaagtgtcggaattacaggcatgagccaccatgccagcctaattttttatttttatttttttgtagagacagggtctcaccatgttgctcagactggctcagactcctgggctcaagtgatcctcctgcctcagcctctcaaaatgttgggattataggcatgaattactacactttgcccaattcctaaattcttaaagcatttagtgatagtattgattcctggtgcctagtagtcttcaggcaacatttttgtattcttatcctgggaagtgcaatcattattcagtagcagcctaccccctccttgttaaacaaaaakaatttattattcaaacttgggcagtatgcaaaaaaccccaattcattacataataactgattaacatttttacccaaagagggttggatgggtctgattccctgtctttaggaatgattctcctgtgcatctcctccatcctcagatgcattgttcagacacatttgctttccttgataaggggggaggtggcacagggcccaggtgatgaatcttctgagtcatttagcccagatttctccattctgagttttcttagaaaaaagttttctgtatattggcagctgagtgaggcccttagccagaatcctttttatcaattctttaatgttgctaactgctaaattaaagttttgaaagtaggtttttcctgttagatggattcattcttgactcagaaccaaatcctatggatatgtaagatgtgtgcacgtcccagtgtttgtaacctgagaattttatttaaaccgtcatttgaatctacagtaatctggtgttggggaggaayaggatctttatcaacaaagagctgccaaaaccccaactgcttcttgagtagctgtaatagatgaataatgttacagccaaccatgcatttcaagttttgctcaaaaggcttttcaactaatgctggtggtattccatatccgtgtgttcatctcagagtgcagtagtttccatctgattttcattacctttcttgagaggatcaactttacaaccggaatcagaaaagcagtcaaagtcattgcaagtggcaatcagtgaaatataacaatttgagcttgggaacatatgtttcattataaagaaaaaaaaaatggttaccccgtaattccaagattcatatttcccagggtagaagggatcatgcacaagttctagtgtaccttcccatatcatgctgacattcctataaagtgcttgttctcccctacagatagccaactcatgaccttccaaggaaacttaactccctttttgattctgaccatttgaaaatgctttattgtatttgagatgaaattcatgtttctgtagttaaatctttcagaatttaaaacttggaactcaacagagtaaatctaaacctctcttcttctcacaggcagctcttatcccaattcctaccatttcctttgctaggctataatatgcattctttctcttatggagtagctttcattcccttaatcactgtggctcctcttcttggaagaagctcaaatttgcctctgtctctcttaaaggcatgtgctgatggaaaactaggctttaaatcacaatatctacattaaattacatctctgctactgattacatgttggaactggggaaaattatttactcttttgtcaytaggrtagcaaaggtgaataaaagagacatggtcaaaataggcaataagcaacttaacaaacaaataaatatataattacaaccttaatcagtagyataaagggctgtcaagggagttctgatgtctcagggtrctccagggcaggccttctgggatggcggctgggtgttttatgatgggaaggagacagagtatattctaggatgtggattgagctaaggagggaaataaatgttttctaataattgaagcagaccagtgtctagagttttaaaggcaaggaggtgagtggaatgagatgagtttgggaagttgcagagctttgtaagcgatgttcagagtttggattttatttgaagtataaggggaagccattgttgggtttgaagaagttacagtgtctgaaataaatttcttaaaactgctctcatgttagatggagaacaaactggagaggacaraagtagaagwtggacatccaattagggggcagctgtcctaatccaggaggttcatgtgctgcttacaacaaatcacgagttttaaatgagaagcaatactttacagaggtcaagacacatacgagtagcctakgattaaacctgattccaccaacwtgagcaacttgctcaagtttctttaacttctttgcacctcagttttctcctgacaggactcataacaggacttactgcagagttgttgtaaatattaaatgagtttatatatgagtttcctgttaactaaatctacaaagaatttttcattattatggtgtgttccactctattttgtattttcagactcaggcattcttttatctagtttttgcctgggaagcacatgggtgaggaatgttaccagattgtttattgttctttggaaactattttttttgccagtgcaacagagaaaaccaacaaccagtgaaggaaaaggcattctatggaccatctattgtattttttctttgtcgtattataaagacctgacacttttttgcatacwtttttttaacatgacggttctaataggacctgtttttaatcttgcttgaaacccgaccttcaatatattgtgacttctctagtgtgaggtggaacagtaagatagcactgccattaggtcatgtcccaggctgtttcctcttgtgatgtgctcacctggttgaataacactccttgttttccagggatcccaggaagtgactatgtgaatgccaactacatagatggstataggaagcaaaatgcctatattgcaacacagggatctctccccgaaacatttggggacttttggagaatgatatgggaacaacggagtgccacagttgtcatgatgacaaaactagaagaaagatcaagggtaagaataagtatccacctctttccttttaaaaattttccctcagagtccctatgttgcatattttattctgttcagaatctaacctttccctaaggcttatctttctaacagatactaattatgaatgggcatcaacaactctaattaaaccattctttaaaactcctctgggtgttttcacaaaagaaattctcccatgttatgatgtgtgtggttgctaaaaagtaaaaaaaaaaaaaaaaaaaaggaatattcacaggaatagacaacttgattagagaaaataaatatttgcttgaacctctttcaaaaacaccattgaacaagaacctacgggctttggggagaatcccaccaatatgtacttccactattttcaactttttctttcttaaaatctgcagcataagacttaagttctgtgaaagaggcttttgcttaaattattcacattagtataaattaagtcagggcagctggaaaaatgatgtggctgaatacacggctgagaaaacataaatgcatagagggcgttttgctagtttaaacttctccaaaatgagtagattttaataatggagtcatagcttggtaaggtccaagaaaagagttttattcatcgtatgggtccaatattatggtgcatggcacattagttaaatgctgttggtttgaaggactaaaaaataatgggtaagcagtataccatattcctgagtacatgtgtacattttgtagcatctgaagaaaatcaacctttaaccttgagaaattaatgatgggatctctgaaacttcattgaagacagcagrtactttcattgaagaatagggacattcaagacagaatttgaaaccacaagtgagaggcctcttttactgtggttatagtagtctcaaaaaggatatttagaaggaagaaagcctgattccccatttactgtgtgaaagttgaggttctgtaaatgttcttctaagctcaacacatggaagtttctctaagcctgggcgtgtatatgagggacaatttaaaagctgcccaagagatttataagggaaaagctcagacagaaacatattaaaaagccacaactgtaacctcaaaggtgggaaatcaaaagcagtgataaatggttggtttagcaaaactaaaaagcaattagatcttttcaaaacatctgaattgtatagagatgttgaaatattgtctaaaatgggaattaagataaaaatgacactgaagacaaatatctgccatactttayatgcaaacccaattcaaaagatgtaaatggatttgttactgatttgtacttaaggtaactcctatatatcaakcagtttctttaaaaacaactcccctcccaagtgatcttggatataatagttcataactataataatgtctaacatattaggtgcattgatatttcataacagccctttacaagaaacactactgtgacctccagtttacatatgagtatactggggcccagaacattacagaagctttgcccaaggtcattcagctaccaaggtcagggataggaattgaagacagacagtctggctccagaacacacgtgcttcaccatcaagccatactgcctgttgacacttctgtgaaactgagacagcygaactattatattacggcatgcatgtaaatccaacctacccagtctgttctgcctggagataactgctggtaacragcagtcatttgcaaaagctgttttcagtaaaacacacattttatcttgacactgcaggccttcattaaactgtgcacagaaacttgttttgaaataaccaaatgaaattctgccccttttctccctaattgcttctaataataaagttagttctaactggccccactgccactgcaacatctgatggtaatgagcagttcttggcggaaggcattgtgacttaaatacctacagtttatctttctgttgcaggctaccttctcccccaactcccctcagccagaggaacttatttggaagttactaaatgaacctctgtttgctcccttcattaattactctttgctcttgcaagttagctttctcctttgttaaatggcctaaggaagccaattaaaatgctgtcttgtgatttttattctgtggtggttcagcctgtacccagatttgtgatgasctgcataagccaataggcatttggggagtctcagccaccaccaatctgacaatacacatgagccctggaccccaaggcccaaaagtcctttgttctccagtccagaacacttgggactaaatgaccacatgtcctggagagatttaacaaagcactggagcctcatattatttcatctgctcttccgtcttcctccctcccatcmttcccatctcaccctttccctatccagttgctcttttacctaaagtagcgggaagaaaggagaaggcattcctggattcccaaacaagagctggaattggctttcactataaaaacaatgttataactaggggtgagttgttagtgaaatctatagctccagacttcaggaacgtggtgggttctgtgggctgaccttgggactcagtgaattttcaattcccagcagccaacttcaaagcagacattggaactagcctggccctatgaagggaagtggcaccagtcttcctcataaagggaggtagtccaggtaacgtaaacaaattacctctccaagagctgaagcttgaaatgtcattatttagattaaggctcaggttcttaaaataatattcattcctatggtacatgaagaaaatatgtgtgcgtsttgtaaatgctgctgtgaattagaagtatgctagactgccactgaccatagatttgcagcagggaagaggggagaaaaggaaagagaagagaagatagcttgatattacgcaggactgcatggggataccaccatgagagaggacagctatgggacagttccaagtagggcactttgcagtcagatgtctgagttcaaataccaactctagcctctactagctgtgtgacaatgagcaagtttacttgactcctcaaattctcatttttccttttttggattatgcggaagggttattgtgggtattgactgagataaaggatgtggcaaggtggctcagtgagtctcaaatggyattgtttggtaaagaagttgggggctttacagtgacaacttcagtttccccaaaagatagcctccaaataattcactctgtgttcccaaatgaraagagtttatttctctatggttgacgatgaatcctgaccaacctctccatgtccctgaacatggttaattatgcccacgtttcccagtgtggcacacccatgcattttattcaagaggagagaggagctcagaccatgggattctttcctacttgctctcccccaggacaggatctccagaatagagatcagccggggaacagaccaaaatagaacattccggctgctacattgactataatacaacatgaaaatcataagtgatatagacatgggttacatgtagtgataagtgccactgaagatacgtttccttattgttcagttttacatcccctctccccttttttggttattttatggtgctacgaaattgtcctgccttagagcccatctctcttttcaagcgttctgttttgccacagcctggttcactcgtttttgtttttcttttagagacagagtcttactctgttgtccaggctgcagtgcagtggtgtggtcatagttcactgtaatctaacatttctgggctcaagcaatcctgcctgaacagcagggactacaggtgcacagcacccacccccagctaatttttagattttgtagagacagagtctcacttttttgcccaggctggtctcaaactcctggcctgaagcagtccttccaccttggccccccaaagtgtttggactgcaggcttgagccagcccgtgcctggctggctcactcttaagctgtcgctcaggtctgaggtttatcaacagcgcttgtattaatacctttggtgagttagaacagctcactgagacaaaaggcttctggattccttagcaggtattagaagtttcactagcatctgttttgagaactgatcattcttagtgtttgcatggctaaagaaacccttataagtgtgaactatgacttaggacttaagttgattatttgaaaacatgagttctttgattttcaaatgctattacttcccttcaaatgtggcctttaaagaattccaawcttaactgagaagactctttgcctggtgtatacattcagctatcaaccctgaaggaaaagtataagttgaatatttcatatgagtttcattagggtatataaagaaatamaaagacaacgggccaggtgcggtggctcacgcctgtaatctcagcgttttgagaggccaaggcgggcagatcacctgaggtcaggagttcgagaccagcgtgaccaacaaggaaaaaccccatctctactaaaaatacaaaattggccaggtataatggcacacgcctgtaatcccagctactcaggaggcggaggcaggagaatcgcttgacccgggagacagaggttgtggtgggccaagattgcaccattgtactccagcctgggcaacaagagtgaaactccatctcaaaacaaaaacaaaaaaacaatgatagaagctggagattttgaagggaaagcatgagttctgctgaaacacacagatcagtttaaagctgttgtagaatgtactgtgtaatatgaaatactgttagtggttttttttccctagtttccatctttattgccaaatcctctcaagttttgcgtagttcattgattctgtagcaagtcattctagttccctagaatgtggtttctaattgtttccatgtttcataacatgccaataagcacacgaattggtctgggcaaccacatggaaggaggaaactgtttggaaaaaatgaagcattttgtagggaaagtaaaatgtatacagctgggatttccactccaaggatattatttttgatgactggggcacatgattggcagccttgcttgcagaattggcatctccgaggtaggattcatctgcttttttaagtaagtgtatattaaattattatttagtgtgtgagtgttcacctttttcccttcatctatcttctcttgactgtttctctcctactctgtctcccatcttgaaatacagaacacagagagaatgcatcaacctcatgcttagaaaattcttgagtaaccctgattagtattagcagttgaaaggcttagtcagggttagaatatatctgacttttacttcacctcaccagcttgccttcattccttgcccatagtagagactcaatgtttatcttgtcttgcaagctttatagtgggggttgattcacttaaagagctgtttgtaaatgtacttagcgttataaatgttggagatggggagtgaaattttgacacttaacaaatcagtcatgatttttattgtaatccaatgtgggctgtgccaattagtagtgaaaatatagggctagaaatgaagaatcctaattcttggtttccaagctatcttaagtcccattttctgtttccaaatagggaatcatacaaaccagatgatrccatatattagtaaagcagatcaaatgttttgtgcatcgtgacttgagttctatcttaggccaaagaatgggaaaattcctgccctactaaattttgtggtttgtgctaatgaatgcaggttagatgctgtcagggccaaagagactgggctggtgttaacttcactttgttaacagtttagggaacttgacatttggctggtggaacacttctgacctaatgaccactcactcctcctcctatgtcttccccagtccttgaatgtcaccttagtaaacttaccctagcacaaagtgaaggtgaggtggagacattcacattttgttctatggctaaaagggcaattctgagcatgaagcagtagaaaaagagattgtgctcaaacattttcttcttttcctataaaacaaagcttgagattcttttcagattgtgagatccttttgggttaaaatttgacagaatcccattgaagattataaatggcagtgctattgttttcattgctgttatcagttttggaaagtccagccttggccagtggcagactaattcttggcccttctggtttgtcaaggttcrgtaagtttaatggagagcaaatgctttccaaatgccaggtttgtgtccttttccaaatggaactggaagcgccaaaggccgtgaacatttaatttctcaaactgcagcctaaagtgctgcctatctagggcaacagaaactgcttttttccttaagcaactttaggaccagcagcacaaacattgcctttggagtctgcatgatgtatgggattgtttttgaaagtggtggatacttaatgtaaakaggacgctggcaacaaaaagaatgatgctcatgttggcaatctaaaggatgttggggtccttatctagaaagttctacacttttggttttctcttgtcagcagacacagcgtcagataaaagagaaagaatcccaccaatttcttgctgtttgttagctttctggattatctaccttctttccccaccccacctgctctacttagaaaggcagctgacagattctggctcaaagcattcctcttaaagccagttagagtcctgatgacctgagtaaagagctggaatgggaggaggagatgcaactttgctcctgatgactttgtacaaagcctctctcattctctgcattcatgtctgtggttctcctgtgctggattaggtctcatttctaaagttttcagaagtatgtgttaatctctgtttactagtgtttagggtccaatgtttggtttttctctgttctttatcagcagaatgtctggaaaggctgatgttcaactggtaaatacccaacatagttgtactggttgttaaaatattgaactgcattgatgctggctggtacctataaattatatttttattgaaacattgagtcatctaatgatamtgtttggaagaggtgacactggagtcaaaggcaactgctgggcagaccaaggcagaagcagaggtggctgtagggctatgtggggcacccaggtgatcctcakgagtgattaggtctgaggtggatactctgaggacccacctcatgtgggaagagctgatatcaaagtgctacttggccaygagaaagaggcacctcacacagttctgctctggttaggacaaagtgccagaaacttgagacttaatgactttcartttaatgggggaagtcattggaaaagtttacggcagctccctatgtcaacttctggcagacacatcaaacaaaagggaataacttttttaaagttaataagcagtttagaaagtgtgcgaatggttcaatgaactggtaggcaattttatgayatgtaatttggtttattttgagaataatatttttcaactttatggctgtatatatgaaaagctgcactggtggtcaaatgctttaatatcactctcatttcaaatattgtagtgcctctttgtcctccactaaatagtgattagtaaagatataataaaatgggggaatacacaaaccagactgactgccagttgggaatagatatagccaaatattgattgagtgcagagaactacactgttgttaaaagagaatcactgagatgctctctgtycttatcgtggaaaatcaagtattcaatctggtcttaaaaatttccagaatagttactataacctgtrgaaataaatagttcagcatttattttttctgcccactaaaattaatgaaatttatctaaaactttcctttattatagtctccctcattaaatgggtattgacaaaagggtaccaacatttccttactcccaaaaataactgtgacttgtgttatctaatgttagcctgtttgtccattccttacaggatactaatgcttgaacaaccactctgcccaaacttactaggtacgaatttagagtcacttttagcaatagttatggtatcccacgtatcatttattgcctcttctaagtccttctttggctaaataatctcgtggcaaatacrttttggattagcaatgctagaaccctttcaaggtatcagtttgttacagttggaattctgatgccttgccatgttgccatgctcagtaagtctttattaaattgagatgaggaggttttgttttcagaaagtggtagacaatttaaaaataagccaatctagttaattgattataaagttggctaccgctcattaagtgcctacaatatgctgagcactcccaaggtaagccatatgggagtaaaaatagcctagaacgagagcccttctcccaaagcatgttcagcagacctaatggatcagctcctaccagatatttgcaatgacaagagttttaaaaataaatttaaatatgttttattattccatcaacttgattttgatagtttgtcatgaaaaaggtaaaataaattaattccattgcataaatttagcaatggtcaccctgttctttccgtaattatagaaaaatgaaagctccacttaagggtaataactttgtgataatraaaagaaatgcctcccgcaaatttagccaaaaatctgaactgtctcagtttaagcttcaagtaaagttactgggtgatgtttctaaaccacagcctgagtgacaagttctgctgttcttcttttccacctctgagttgaacacatactcttttcagaagacaytggggcccacatagatgaagagaattgtttggaatctcagaaccacctatttgaagaacaaggaggtttagaaacaccccacttagtcagtaaggctaatggattgagggcagggactgggtcttatgtcaccttgatgccccacaactgctaacaccttgctttgcacctagaaaatcctaaatcagtatctgctgaaattaataacatgttcttttttttcacatttagactgatttaggtaatttataacaacaaccccccacacacaaaaatccagaatgtcatcaaactgataaccaatgatagctagtgtttgttgaatgcctgtttgtgccagccatttgggttaagtgttttaggggcatcacttcaatccccacaatagctctgtaatgctggagacactgttcccatttcacagatgaggcggccagactttggtcctggaaacagagaaacaattttccaggcatccagggagactctgcctgaccttccatgaatcagtcctaraggccgcttgtatccattctaaatcaaatagaaaaaggcaaaaaaccgtattcgtattcagtagctcctgccttctagttcttatgtactcaaagggagctgccttcatttctcatctcacaatcagctttatgtgtgaagcctaacaaatagtaactctctctagaaataccttatgatattttctcttaagaagaccgagtaggggaaggaaagttgtcaaaggaaaacattttaagagaggaaaatggagatagttcatttatactggctaatgaggaaagaaaaaatatctctattgttctcctttttctttctcactacatttcatacttgctccctaatgctgaaatcagaaatcatatgtttagcatatggcaaaaaaggagacttaaaataatatttgtcagtaactctaagcccttaaattcagccctccaaaatcagatgaaggtgtgcaggctactcagagaatgagrtcgagaaaggaagtactgaggtgcttaccagcaaagggaaaaatgyattgctgtcactattcagataagctcaggaaaagcttctaatcccactgctgaggccatgtgtgtgcatttccacatacgttaggatatttatttttcataaggtccttttgagaaatatttcctgagagaaaatggtaatatttagacatatccrctttaaaaaattgcctctgatttttgcagttgagtttgaaatgtttatttttcttttggtaaatactaaaaatgcattgttcaaaagcaacttttttcttcttttagctagaaattttcacagcgtttactccttayagtaatgcttcctggtattttttttctaaaggggtcagagtctaagccaataatagytgcagtttgaaacttattactagaaatgtaaggattagtataattttagttcttcctgcatcttaggaatggagaagatttgtagatggagagtcatttttccaaaagttgtatgaaggttgccttctcattctttccttcatctccttttcttacctcactagaaggtctaaatgtaatcgagtcccagttttaaaatataattatattgaatttggttcagtgcattgaactggctgtatagatcattttgttgcattaatgtgctgtttttgtgcatatcatagtgatatttgtcctyagggatttcattagtttattttaaaccgaaagggttgctctccagctgagactgttaaatgatgaatttgagtttctctcttgaatcttcaactcaacccattgttggcatcttcttgaatattacaatatgaggcctccagagttcctcttgtcctctgctgggagacatccacctgacatctatttcatggtttaaaacaaagcctttggcataatttttgttaattttttttttctcatctatatcatgactgctgaagtagtgttggttctattcagatggtagcttttgctaaatatgtcatctgtgacctgggttttagcttatggtgaaagaacatatagagatgcccatgcctggtcactctacgtcagtattctccttcaagaattatcatttccctatgttgttatctctttgagtcagggcaaatgatagaaataaaaaacacagaaggctattttgtacaactaggaaacacacaaaatattctttacatcttattaaggcaaaatttttgtcttactrtggacaatttttgtttgttttcatcaaaaagatgatgtttgtgtggtctcaaagttgaaatcaaggcataggaatcaaaccttgtgaatttaatatctagcttactgtatagctataaagtgcttttcttttttgtcttgtctgggaaattctgtacaggataaaacttctccctttcttagaagggccaatagtttcatggaaagagcctgaattctcagaggagcaaatgctatctctgtgaaagagaaaattacagtattattcacagaatgttacaaatactcatattaaacataaaagcaaatcattatgtaataattctatttgctggacccaaaaaattctagtgtctctaataataatgctttattgcctttgtttaaatccaaagattgtgattttctgttctttttcaaatagaaaggtgtattccctattgtaaaatactgctaggagctttctttacctagagaaatgtatttcagttgggttctcttaagaattagtcccattaaaaaaaagtctgagatagaaagggtaaatatagtcagatctatggccttactccaaaaatattgtgctgtgtttgttacttttcattatactttttaatgcccaacagactcattcagtgaatttgaggtttactgcagacttggaattattctttgttgtgtgttaaactaattaggctgaaaactttttatgtgcttttgttccacttcacatagaaattgtagattattcatcttggatgaattttaaattatttaaactttgcactgttagtgtgtgaccctctgagactctttttaaggaacagacaactctttttcctgcagacattataggtttaatttgctttggatacaaataacatttatcttgtgttyaaaaaaaaagcacatgcttatgttgtttattatactttgatagattttccaattatttctacttttctttaaacaagcatatttggaagttgtgctttttaaatcttgatgaagtaacactatcttaccatgtagtttaaatgacaaagtgtcatcctcccgatgtgattcataacgtctatcccaggacaaatttgttttctcttcaagctcactgaagtttcaaatccctctctctgtattttacccagcaacaatctgcaacttatttttctccaggaaaattgaatctgttactgtttagtattcctaccagtttgaaaaatgtggtttatrttggcatcagagcagtaatttacatatattgggataacaaaaatgcatgccagaaaaagatcaacataaaatgaagtgcagaaaagctgttttccttcaacagcaactcaaagcaaagttaatagagaaattgatgagcatttgccctgaatgtgtcacttgtttcttgtaggtgaagtgtgaccagtattggcctagcagaggcacagaaacccacggactcgttcaagtaacgctgcttgwtactgtggagctggccacatattgtgttcgaacatttgcactttacaaggtttgcttttcatctttttctcctccctttcccttctctattgtttaaagaaagcttcttttgagaaatgaaatctcttaaggctttacttaaatcttgatctcaatggcaacagtgaagaatgaaataratcttccattatcactcagccatttttcttcttgtctggcgatttatcagtaaatataaaactcttgctccaaatgaaagtttcagccaatgaagagtagatgaagaagaactagctcttcctgtaaaatgtgataggagctctcctggtagttaaacctgaaaaatataatgcttctcacctaagaatyttgtcttcctgcgcaaatatttgtcatttacaaatagcttggggtttctatttccaaagagtgtgtcttcccaaaggctacagggtggtagaaaggaattaaaatagcacattttagcattacctcttccctgttattcatcattaccacctgaggcttggaaaacagaatttcagctgatattcctatttcacagaatggttcaagtgagaagagagaagtgagacaattccagttcaccgcctggcctgatcatggtgttccagaacaccctacaccttttctagctttcttacgtagagtcaaaacctgtaaccctcccgatgctggtccgatggttgtgcactgcaggtaagaagcgtttgttcacttgcagtcaggaaacagaaagctaaattgactctcattggatgtttctgcaacttcttgacattctggaatagtaaatgtcttcataaataatacagctctcttttggtcaaatgaggcctatgctaacatcaataggatggatttgacatagatgcatatttcccctggagatagtaggtagctatggtccactgctattgtcttttcccagtgaagagaaataaataaacacaaaattaagtgggcacatggctataaatatgtaaaacaaaaaataatatgtgggggaatattcttaaaaacaaatttgtattgtttgacaagttcttgtgggctggactgatacaacctttttactatttataggggaaaaaaattactgaacaaaataataatatatcatacaagctttagggagactatcttattgcttaaagatgccttctgtacattagtaatatcaagtctcatgacaaatcactaatttgatttttaaaaatgtatttaatagaatatatacaagttctataatttggaagaagtcgttttatgtactcaaaggtaataagttgtatttctctcgaaatgtatagtttgtattttttgcttaactctaacagctacatcaccactcagattgcgatatatataaatgtttatagatttttaaatattaagctgatttcttccagttgtttgagtgcctcttaagtatcattattagcagactactcaagctatctggtcagagtctatttattactatataaatgtatagtgcatataatttcatgatagttctttataacctgagaaattcaaatatgagaaaatattgcttcttccacagataagtaaaatagaagtctgggagtataggaaaaacccaagaaagcatctatcgtaaatcacttctatcgtgacttaataccatcactctctttcataccccatattatactataatataaatataatacagtagaccctagaaaaggagctagttttttagaaatggggtcaacgggctgatcagaataaaagcagtgaaattcacctagccaaaccatgctacaatgctcattgttaaacaatgagctggcaagttccaaacaggataaagtttctcttttccagcaaatgttttcctagataaaaactagtaataacattaccttgtatttatggagagtattttactaatttcaaagcactcccctatgctttattttgtttgatgttcataacaacagtatgttgggttaagagaattatgtcgtgtcaagagaagtgagaggctacaaagtttgcttcaagtactgataactaagaaggtgatggcgtaatcggcctcaagtcttatctagattcttgtttccctacatccaagacagggtcctttgaggactggccactccagttgcagttttctgcatgattgtaaaacattaaaaattatttttaatttgagcaagtggttttacatcatgaaagtagacttctggttctcctgccttttggttttaattcaggtgctagtttgatcagtctgtatgctcacagttctttgcaggcctcaaagagccaatgtacctgattatatggtgcctctgcttggtcagatctgaccttgattataaaaatcacacatgaaacacatgaattgttttcagatagagtttggccaaaggatagagaaacagaaaatttggtctagcagaagaaatgttgcccttatatgcctaatggcaaaaatacggtacacacacacacacacacacacacacacacacacacacagacacgtgtgtaattatatgtttaaaataatrggaacaaaaattagagacacataatttgggagttttcactgaaaaacagcatgatgatttttttcacattgcatttcaaaatacagaatctgtgctttctccaaatgttcttcccatttccgtaaattaaagtggaggcactagaaaactgagataggtaggtaggtagatagatagatagatagatagatagatagatagatagatagatagatagacagacagacacatacacatacatacatacatacatacatacatacatacatacatacataatttttaaaatgcatttcaccctctgtagattataagcaaggtatgggtttcatgctaggcaccgtgacagatacaaaaatgtttgcaagcaaatagcaaatatgagagataagcattaaatagctgtaatgccttattttgagaaaatacacacacacacacacacacacacacacacacacccgcatccatgttatgttaagccacctggactcacctctgagagagacaggctactcaggagaaataaggaaacaaagatgaatgtgctgagctaatagctgctgacatttggaagtgctgcgcctgaggctctggagaagctgcttattgaaacaaacaacagaagagtaggtatattggtggaagaaatttgttagcaacttcgaaacaatgagggaaaggaactgcataaactgagctctgtgaaataattacccataggtaattttacatgtctggtaagaagttttggcctctttatttaggagggtcatgtcaacatcgtcaacatccatgttatcttgaatccttgagttgaatasaagccaagttaaaacttgacagtataatgttttgtgacaaagcagcagattaaagtcattcttaaatgacagttatccgtgtagcatcccagaaatgctagtttagaaaccatttctgagcagaaagaaactatgcaaaaagccacaatagccatgttacaaagggatactgatcacggttaatcatgatcatgttacacataatcacaaaaaatagtctggaaggtgaatactgtattttgtgttgtgatttcttttattatgtactaaactttttttctatattaaagaagtagtgacaaagtagatccaagccttctgcccaatatatcctgtgagaatggaggaggtttcaaagaagtcaggtagtagcccaaaaaaggtcrggctggcggtgcagtacagaaaaaggaaattatggtcctccaatgattctgtgctgtaattggactaagacaaaaatgagccattaagtaaaagaaattctaacaatcaacaacaaaaaagaattttagggatagcctagtgcaacaagcgcagacaaggccttggaaggtcaaggaggacagagtctaccagatttctaaaagaaagaaggtctagttcaaacaggcaagcaaggaaaggccaactctagttatctatcagttcatacagagcatagaatctcaacattgagagtacacactctggagagatagactgcctaagtaaaatgtcagcttgtttacttactggctgtatgcctttggacaaattatttaatctcygtttcttcacctgtaaaatgggataacgctatagcaatgagaattttataaaaattaagtaagatgacataaaatagatacatataaagcacttgagacagtgcatggcatatagaagtatgcagtaattttaaattattaataattattcattactragtaccttttaaaagctgtgtgtatatttagaactctgagaagaaaaattcaacatgaatttggatatcatctacgtaacctgagccatccattttattaaataacagatgtttataaacatccaaatcattaaatgaatggattttttcaaatgtacatattttctactatggcaatcccatgagacttttctcagtgagagagaacatgttgatgctatgtgttagagaggatcatttataataatacatctgtttgtataaagacctgagaaacctttcaactcttaaaatgatgctgttaaaggaacttaatgccattgtccttgatgccttcaagatgaggtstgaactgcttatcattgcattcatgcccctttgtaatttaggctgatctcacccttcgcacctcattgttgactccttgggccatcttctgatagctacacattccaaatatcttcatctctggatctcagccaaagatatttatctggtctagaatttcaacaattccccttctctacctgatggtgttcaaccttgatgcataatccaacttaaatagcattttctatttgtattgcagaggttgcaaactggcttcagatagttttgttgatatacacgataatttttttaaaatttgagcatgaatttctttaagctggaatgcactatccagttttgcaaacccttcccactccctattrttttacacrcatttatgacattgctttatcttgtagacatttgagttgtaactctggagaaacattttaagcttattccccatttctcttcccacaggaagaattaaatattctgtaaattctcatagaataggttcacactgtgcaagtttagctatatgtgtgcagatcatacgtaccttgagatctcagaaggcatgagtmayggcttatgtacatttttacccccagctcttacaccttagtaagcactcaataattgcttgtccaagtttgttgaattacatatggcattttagtaatttttacaaaaatagtaagagtttcaaggctggactgatttttttggtttgtgttttcaccttagagactatatttttttccctttatattggggtatttctttatgagagcttactttttaaattgcctttgccttacttataactatttctgagttcctttttctaccactctacatttcatgttctttcccacataccatctattccatgattaaatttagacatagctccccattttgtarsaatactaatagttcaggatagttgagcacttattcaacatcaaataatctttcttgccaactgaagaggccctgtcataagtgctttatatgtgttactgcttttcgcttcccgtggtaatttacaaggagtaattttagtctcccatttcacagaagaaaaaacagcagaggccaggtaagatcagcttgcttgcctgagctcatactactagtggtggcaaggccattatgttccccatgttgcatggccctataaatcaggcagattctccagactttaggtcccatgatggttyttagctcccctttctgctgtccctttgggggcatttctctgatttctctgtcaagccttccctggtgacctggtcagaatgagccactccttcctttctgattscataccacattgctatattctggcctttctttcactctttctaaatcaaaggcaattgctagcatgtgagtcttttccattctttaatcactggaacataaataatcacaatagctaccaatcatggagccattactgttttccaagtattactgagcagtcatttaatccagaaaatagtatattttgcttgcaaagagcattccgcacagggaggtaataagtgatttgttcaaggtcatacagcatatacatttcatcctgatttcaaagtccatggcctgtttacccatcattatatccagttcttactcttcgtattgcagagaccacctagtcccttatacttagctctttactgcacatgtgtaaaggttgtcagatatttgccattatctcttcacagcacatatatatatgtgtgtgtgtgtgtgtatatatatatatgtgcagtgcatgaatagagacatatagtattgcttttatcttatttataaaatgtgattttggggcagaactttctatttattaaactgagattttcttaagaggtcacggattatattttcctatatcgtcttagtcttccacttagaaactaaggccgttttgttccacttttgagcctcgttccttrtgttgttttatagaataatttgtggctttattctaaaccacatattctataaagactatattctagtaccagagggacatgacaactgatttgctctaagtatttgcatttgttaggaatgaatacattgggaaaaagctgtaatttcagtgaatcagttataaaaccttgacccatgatactagaatgaatacattgggaaaaagctgtaatttcagtgaatcagttataaaaccttgacccatgatactaaatcttatgtcacattaactctttttaagacaaaaggaagacattttattcataagagaaacatttatttatgaaaaaaattgaaaaggggatagatcacaactcctgaattgatcttctaagtgaaacagtctcaaggaaaataaaataagcttcctgagtatcacttaaatctatcacaatcatagaatcaaaccactcttcagaactggaaggaatagggactgcataccagatagagagcaataaggtcctagaagcaccaacaggccactaaaatggcccagtaaaaaatcagatgccagtttggggttgtaaaaactcctaagttccaatcttcataatactttttgactttgcatatggaagcacaaccaggaaactatgtaggccatattcatagcataaccatgtacccctaagcccaacccaatagtgatgaaaatggccttttcaaagtcaaaagaaagattttggaaagcattgcataagagcataaaaacaaaagaccttgtgatccaaagaagctaagagtgctgtggaaaattgtttaatacatttttaaccattcattctaaattccatttttatttcttctaatgttccattcaaatgtctcttcagatcaaagaccacaagtattgccaaagcatgtgatagttttgagatgctgacaaacgtgaaccatagacccatgttttccttaaacctggggtttatctttatgtgtaaattacggaataggagatgctagccttctgtagatgaaaggtaggattgttaaaaatgccaacatctcgataagaatgggtggagtgtacaaattatgtccttatttatggaaacattttaaggtaaggaaaaataattatgccatgtggaacccattatgccagattctgttttcatacaccaataattctgtataagaagcaaatgcgtagtttatgaaacaacatagtgttaaaaacaggaggctgggtcttcagtctgttgatggcacagtcctatgatagaaaaatatcttccttctgccaaaatagtttaaaagtaatggaaccaaaaaaaaaaaaaaaaaagcattaaaaggaattgcatagtgtccccagtaggtataaagtgtaaaactcaaaatggagaagttgaggtgctaggaagagcattctggctgcctgatgaaatgcagaatttatttgaaaagaagcataatagatataaatgcagtggaagagaggtgaggccaatagtaatacaatactatctaacttcaaaatcatatatcaggtctatttgatgaaggttccttcaagggcaactgagaacctatcaccaatcctgttcccatttcgtgcctaagaatagcaaccaactcacttttgtgttgtaagtgactgtttacagagcatctccccatcacttattttatttgatgtttatgataagagtggcagatgtgcattattactttcctcactcgccagctaaggaaattgagaccctgaraagttaagtgatttgctgaagaaaacgtacttaactagtaagcggaatcagaaggagaaccccctttctgatctatgtgtatattatactgccattttccattttgctcaatgtgtatcctacaaatgggggtagaactgtccctaacctacaaatgagatggctcctagcacatagagctgctcttaggggccagcattgtatggtagtgaaaactctgcaattgaaattgttctaacaaacagagttcaaatcttagctgtactatttactgcatctgtgacctcgagcacattaaacaatctttctaagactcaatttcctgatcagtaacgtggggataatagtggtatttctttcatagtattggttttaaagattaaataagagccgtgtaaagtgattcattagcctgttacatagaaagaagtcaacaaatgtttacagttactgacttytaaaaattattgttttacctcacagttatttaaattgactctgttaatgtccacaaagaatactattatattttctggactgtgagtttgagttctacgtaattgttgattcagaaragtagaaaacatgtgcatgtatacattaacatagaagatgggtggcaactggaatatttaacacggaaaaatgtgttaagtactgttataattatwtcattgcactaaaataaatgctttgcttattagaaccaattgtttctataagcagggtttcttaacctcagcagtttggacattttagatcgtagaattttggctatgagagccgtcctatacattataggatgcttagcagcgtccttgggctttgctcaccaccctcacctcccttcccccacattgttacaataaaaacatgtcctaggcatagccaaatgtccccttggatataaaatcgcccctacatgaaaaccactgcttatggtaataaaactaatttttaattttggcagaattattgggtccaaacgataacccacctcaaagcttttaacttaaaaaaaaaatgcttatttgaatgcaactcttattttaaatatttggagaacttctttgtgagacttactttaattataaccttttaaagcatacagagaactaggctcattacttgaaaagaaatctaatagtgtttcttaccttggtcaccaaccatacaaaccatacgcttggctccaggtatctcttggcactagaaaaataaataaataaatccactttcaaggacaaagatgtgccaccattactggattcaaaagaacaggccgtaggcgtttaactctactgccaagaaggagttccaaaaatatttttgcaccatggcagcgttgcattaaatctttgtcctctcaaagtggctagttttaagggccatgctctttggagttgataaatgctagtcttttgtgctatgatattagtcacattgcttcgtattcacacttggtatgacgtccagcattttggcagttccaaacaataagccccaggagtgccctcaagtggcatatgacttagtgactgtccctttctcattgtttaatggaggccaaagataacagatgagatgaatggaaagaaagtgagtcataatgtcagactgcctcctcaagcttgcaggttcctgaaattctttgccctttgatttttgagggttcagatttctgggacagcacacttatttttaaatcacagaaatttaccaaagatgagttgcttatgaaaaacttaaatatttttcattttttgtttttgtctactttcttccaagggacatgagcagtcttgctttttctgtctcttcccatctcacctccctcaatacctcttccacttccccccaaaattcttctctacattgcagttcatcaagggagaggcagcagttaagtgtttcaccagtgcacagtggtgcttgctgagtgtatggtttgtcatatctctagtatattaaaaaaagaactagataaaatgagtcaggattaactgtggctcttccattccaatggtaaacagccacttgctcttgctcaaatttcatttaatgtctgaaagggagaggatgatgagaattatgattattttgagaatatttcttttctctctgtttttgttcatttgttttggtgttgagcattgaatcatattttaaaatactataaccgtatttctgtttctggtacacctgtgtgccacaggagttggcagaacggagggtatgtctgtcagttagcattgctacctacaaataccaacccaaaacactgtggcttaaaaccacagtaatttgttttttctcgcaagtctgtgggttgacttggggcaggacatggatcttctgcctatctctcctgagctctttttctcagtcagcttgaagggctgggaaagccaaatggggtctctctttctccccaaggcttttcatcctggtccagtgggctcagggttctgaggacatcaaaggggaagctacaaggccttttgagacaattgcttttgctgcattccttggtttaaaacaagtcaggggccattccagattcaaggaatggggaagcatactccacctttggatgggaaaacaacaactcatttatgacctcatttattctacctctgagtgccacattgctgaaccttatttactggattggtggaactctgctctccatgctcatcagcctggctaaatacaatgtgaatttccctccccaggctcgatgagaggagccaagccccctaagctgaccccaaaatacagggtttatgaatagtatgtgaaataggtaagaaagtaggaaaaaagtccattctcaaaaatgcatttcataactgctacctgattacttctggtaaaatattagcttgtgggtaggagaaacttgtgctcttaactctccttacatcctaactcaaaaatattttctttacatcttcctgtaattcaagatttactggggctagtgggcctctttttgaactcagaaacaggactatgattcattcacagtgaatcatagccgtggaagggacatttccagactctcagaccacttcccctcctgcagccttctctttttttaattttttttttaaatttcagagttgagttgagaaaacaaaattaggccaatgaggttgacagctttcccataggcttctgctggactcaagtcttcagactgygggtctagtatgttttccactgcagtatggtccttaaaattttgttsaaatcaatttgattaaagggtcccttaacattttctagatgcattaggaaaataaccagaaagcacctgtatattgagaggaagtgttatgtttgacaccaagatgattggagtaggtaattttgacacattagacccaattaagcatcccagatcttcaagcccatgaataatgggaagaaaggctgatgggtagccagggagcaccctgaatgcactgggtaccaatttggtcagtgaggctaccgcagcagaaaatcgtagagcgatgccaaagggagatggagaagatgtcagagatagataaacttgtcctgccttgcggcagtgcctggagctgtgatggtggaaaccacttcaggccactaaaaattacttgacatgctgtcttggcaggccctgctctggttcacagtggctgccttgtgtatctgccgctcccgttggagtgctagcctggctgtgccgtggctgtagcatgagctttttagtgtcgatatgcttgggaggcccatcagctacaatttcctcatctcakgctccagccagmtgcagcagatgctattgttacctcttctattcgataaagtaggaagcaaagagagaaagaaatttgtcaatattgtttttctgctggaaccgaaataaaaactgtgtgtggtacactgtccaatgataacccatgtgccaaatctccattttgtgtaacacgcttatataagactctgcttctgtatttcttaacgtaatgtaaatgaccttcttgattccattgtagatgtgttacaattacagccattcagatttctcaatttggatttgtgctatttcttgcacttgcaaaccctttgcttctgaccatgccatctgctggaatcatttatatttctttcacacactcacagtgtttgttatatgccagtatttagctgtgtaaaactctgaaatattgtatataaataaacaaatgtttagcaagtattttcaaaccctttgccttgataactggcattaataaggtacatttgtgtttctaacataagtacagctgccgagagaatttcttgttacagaaatgtataaagtgacaccaaaatcagaagagaatcccttttgaaataaaagcttgcatatgcaagcagtctctgtgctgaggacaaagtaaatgatgatgaattcagctagcaaaaatttctttttggatacaaaacatagctgggggtgggggctgtctgtcttcaaactctcctaagttgctggaccttccaagttatcccatcaaacttttgagccccaataggacattggtcagcctgcaaaggcttattaatttctttctcactgctctattctgatcacccagttaagtgcaatgtgaatttccttcacaggactggatgagaagagcaaaacccccaagtacaacccaaactgagggttttttggtcaatctataaaataggtaagagaggaggaaaaagggccttttaatttttttcagaacrgccacctgatcttttttgttgttgttgccattttcacctggttgatttgctttttcctcttgaatccctaactacccctagatgtgtatagaagagttgtgaattggagtgcctttttctgtgatttttcccttcactgcggtaaggctcctccttgtcactgaagcagagcttatattgagatttgacctatgtgttgtctaaatacagattatttgaagatgctgggttttttaaattatactgtcctccaagctaagagtgaatactgtaaatgaatgcagaagataaatgtatataagatgcaacctcaaatggtcacaatggtaagcctccaaattttatcaagagctagggttgttggatttttgtatggacaaacagagaccacgaatggtctccagatataatctatgttttacacatgctcaaaaaccctagtaaaaatcaaatacttcytaaagcagtaggcaattgcatatatagtaggcaattttaaaatgttaaactgataaatcaagctcctggatctttaaatcttcattttaagtgtgtcttaataaaaacaactctgaattccatgactttcactacatacttagctttcaggatcaaaaaaatgataattgtagaaatgtagaaaaataagagatattggataaaactgtatgatcttgtgcaagtcactcacttgactgaagttatagctctgtagaaaggtagagaacagtctggtcatttgccaatggcatcttctcagaggaaaactggataaaatcagatagattaaatgcttgtttactctgatgatgattatgatgatggtgattggttttctagaaatctgtttctttgaagaaacaacttcagtccaaattttggtttataggtggtcagtcattcttcacatcctaaactctcactttgtcaacctgaaccaactccaattctaatcaattgggcagaggctttctcagtctggactcatgcttgctacttagatttgaaaaaccataaccaatcatgttacaaaccacaaaaatcctcctctacaatctatggttaatatttcatccctctttcgtgtgtctgaaaatgattgacctggtttcagactattttctctgaggtactatagtctgaaatccatttgctatcttggttcaattaaactcaaacttattggtttgtagggtacaatagtaaagctacaagcttagcaaaacctcttccagaatttagtaaggagctctgtgaatgtagtmcagttacaagagataggtatgtatgcctttgttgttgtgtttatattttctaaaggcttaggaataaacacatcyttaaaatctgagataataattctacatgtaagtcatttttagagtgaagctttgtggcctgcatactgtacaaaggtacaaattcccaaggtggtctacatacctcttgctgaattctttgcctgcatttctgcatgggcaatctcatcaagtcacatggttttctgctaaagcttcaccatatcacagtttggctayggcctaagaaaccaatagtccartcctagctattggaagaaggtgagtgggtctgaacacgatcctctttgttatttctgccctgtgggggacttctgtacacttagaaagtgctttaccttaagcgggaacaaaggaggctgttttttcagaattttttttagtttggtcattttcaaacataccccaaagtggagagaatgtataatgaacccccaagcacgcatcacacagcttcaattatcaacattccaggcagtgtttgttaaatggcaattcattttctgtttttcaaagaaactcattacataactgccattcaacatctgagattttaatagcctgggcaaccttatctcaggtaaatattcaatttccatggacagaggtagtgtaaagggcatttattactgctttctcgactccaggttgagtgctcctagactaggtgtcctrtgctgttataatctgatacctagactgcttttctacatctgaagtcttttatagcrtgaagtttcaaaatgattacagagtattaaaaccacctccctctttggaaagcttgtaccccaaattgtccttagcaacatttggcttgcagtcttttaaaattttcactcagcacctttacttttaattaggctcagttcatcaaagcctccaccactgcctgttatttgacattctaagtttcacattcccctgctaaaatttttcttttaatctgtgaaagcagagctagatttaaaatgttctgctacttcattgagaagaaagaagaaaatagaaaaaaatagcagttttaccaatctaagttwtacaaatccgtatgttgaccatttaatctgacgcattcataattggcatacataattcacacctattctgggttataagaagtatgagaaaatctacagaaacagaaaaaaaggtttgaacataagaatgaaaatcacttagaaaatttgggatacctcatcaatatatgtgcacattgaatcatggattattaattgatgcaggggggtgaatttctgtagtcaaataagtatgggtaaaagtaagtttaactggtttctttacagcagggtttctcagcctaatgcattgtgagccttcaagaggaaatttatagaactatttgtccccccttggaatttctctaaggactccaggaagtgctatcataaaagaaatgtttcatagcctggataatttggctcacagtaataaaacgagatgatgaactactaagtgtaattggctaatcaattagcaacattcaataaaatgtatatataaatataaccagtaaatatttattacaacttcactgtgcaaaactgtgggttatagagtatggtatctccttcaaaaagcttaatcatcatatatgaagagatctaaagcaatcaagaccattcagaaggaaccttgatctatatgttcagtttagacttgatcatttagacaaaacctcaagtgaagcaaagaaccctaaaatgtatgtatacagttgacattaacctcaaatgcataactgtatattagattcaccagtttttaaaatttgggactaagaactcttatttgagtatgaccaatgattagcagatttagtgtttttaatatcracagcaaacagtagtttgtttctaaagttaagcaactttagaatccatctagatgtttataaatatttttccatttacctgcagttgtgtcacccttacctaattcaatggtactttattggctatgacgggacacaaattacttttacgtctatctttccaaagtaattaacttggtttttacagaaacaactcatttattttgtaactatatctcgtcattttatctaagaattacattacttaaatgaaatgactgattatttttggaataaacatgatgacaccacaaacattctagagccacagacaacctggagagtagcctcctaacaaacattgagctgacctagtgcagtaagcaatgggaggagctttttggaggaaaaggaaagcttgagttaaattggttaaatggaagtcagataagaccatgcatattgatagccatatgcctaaggaaaggaagaaatgatggaacaaacactaagtggtacttgagataaggggaggaaaacagaactttgacacaaacaaagcaatgcaactgaaatacagagattttattttagtctctgttcctgagtctctccacctgtaaaatgcaagagaatgscttgatgggtggctcagaaactttagcaagcaccagaatcacctaggggcttttaaaaattcaaatagctggccgggtggggtggctcacgcctataatcctggcactttgggaggctgaggcaggtggagtacttgagaccaggaattccagaccagcctgggcaatacagtgaaaccctgtctctactaaaactataaaatttataattattttataaatttgctggcatatgtctgtaattccagctactcgggagcctgaagcaagagaattgcttgaacctgggaggtggaagttgcagtgagctgagattgtaccactgcactccagcctgggcaacagagcgaggctcagtctcaaaaataatgaaataataaaattcaaactgcttgaccccaccccttgagtttctgattctctaggttggggtggggcctgaaaaattgcatttctaacagtttcctacatgctgctgatgctgctggtcatggggccgcactttgagaaccaccagatctctaagatccctgccgaatctaaaatctgattcaatttttttttgtttttttttttttttgtttttttttttttttgagacggagtctcgctctgtggcccaggtgggagtgcagtggtgcaatctcggctcactgcaagctccgcctcccaggttcacgccattctcctgcctcagcctcccgagtagctgggactacaggcgcccgccaccacgcccggctaatttttttgtatttttagtagagacggggtttcaccgtgttagccaggatggtctcgatctcctgacctcgtgatccgcccgcctcggcctcccaaagtgctgggattacaagaaatctgattcaattttatattacatttttttttcctgagaggatttaaaccagaaaataaagttaaatattggtttcataaaatttattagtagaagtctaataaactatgcaagaataggaaggttgcatatctactctgtggttaggctaactgaattaaaatattcaattctaggtcctcaattcatagaaaaaagagtactgaaattaacattgatcaagaagctattatttaaaatgtattttgctgacagtatcatagaaaacttaggaaatnggtttacattttacaggtgagaaaacagaggctctggaagaataaataaatgatgtatttaagatacaagctgcaggtggaagagccagagttagtatstctaaattccataaaatttttgtttgccagcctggttctttcataaaatgagtacatcacatcaaagaccatttgctctgttatgcttaattgaaaacaaaatagtcagtatcatcaactcagtcaggactttaaattaygtttaaactattttaaccagtaagaagtgaaccttcaagaaaaaaaaaaatgatggggggaattttaaagtgtagtaagtctttaattccatgagccaaaactgaatttcttccccaggctgtaactttcaaccgttagagatacgtggttggagatggtgtctatgaggtcacattgcatcctcccttagaactatgccatgtgtgaaacagacactaaataaagtgagcattagagtagaagtgtcacaatccaaaacgatgccaggagtcataccatgcaagaatctgaagggtataatgatctgtatgtatagactaaaaaatacgggacttagtagaattactctcaaagaccaagaagtattggtttcctttgttacttaggggaaagggagggactgggagtaggctattgaccagattttgtggataccaaaccctgtaggatacttacattcattttgtcagggtttgtaaatgttgagtgtggggcttgcattgtaattagcaktatgcctagtattaatggaaatgtatgctgcatccctgagaattatcagggtaataagcatcctattcccaatatcttcctccctatatgaggtagattaagtctgcaaagagaagcatttattggccccgaaaagggatgcaccatatagcgtccctagtattaagaaaaaaacttcattttccttgagtgggttccttactaaggagcagtttgttcttccctgctcaccacattctctccatttccaaaacagacagagccaataaaaggaactattgcttgtctcaaatgcagtatatttgctgcttatatgttctttgatgaattcagccctcggtttatccctcttcagggkttccagtccagtaaggaaggcagcttggggtctccaaataggcctagactccatgagtgaggctgccaaggcatttgatagaatgaaaattgccaagctrttcctgcatctcttggtgagctgctaaaatgaggcattgtcttcaaacagagggaatagctttaacttcaaagaatttgtattcattttctggtaaagttaggaaaagcagctcatccacagcagtgactggagaatgaggaaaagagttggtgtgtccccagaaactctgcccttcgaagaagaattgttggcattgcagtgtgatcccacagcatgctgggttcctcatgactttgtcagttatggaaggcatctcaggttctttgtagcgtatagcttatgtaaaatagatatccatgagttaatccgtcagcagawtaaatacccttccagttactcaaatatagtaattttataaatttctttgataaaagtagattttcagatgctgccactcatcatctatatattttagtgcttttgagtatttctatataattatatttaatactgtaaactataagtgctgtaatttcctttgacctatgttgcagttggatacattacttgatcagagctctcaatgaatcattttatgcacacgtatttagttaattggttatttttttcctgcctgtgtttatatgtaatatactctataaggaaaggaaatcagcctgcctgcagctgagtctggtagaagagcaattaagttctatcagaacaaacagctgtcaataatgaggtctgaattaaaattactaccaaagaaaggaatctagacatctgcaggaaatgtgaaaatatttttataacctaatagctgagatctggacaggggtatcactgagttttcccagctgtacctgcaatrtattttgaaatgttcccakactgaaagaacactgaaacttattgcatgaactagactgcatttaaaaaataataatgttggctgcctttgaacagtgtgtattttgatttcatgtaatcagcatgaaaactttctatttcaaactattttgctgtgccccttggtcataaaatgaggcttaaaaatagttctgttatctttgtttggtgtctttccaatctgggttctattgcttagatatttttctttctgtctttggaaaaatacttttaggtcttattacatggtatctgatttgctcgcatttggggttgtttcttgcaaagaaaactcaaaaggtgggctttgggcatctgagttttattacaagataattccatatattttcaggtatctggagatagtaaagtatttggtcttaaaaaaaatgaaaagcaaactttgcgtttttgaaagcagccctttgcggtctctcctttccattgaactttacattgctaaggacaaaaaatccttatgaatgagagattttgatttttttaaatttatgtgtatgtatgtaaacacacacatatgtacattattatgagtgtattctgtgcacctttttgtctgtatttacatataaaaatgttagcaatgtgcctgtatcctcattacccaaagtgtggcccagcgaccagccatatcagcatggctttagaacttgttggaaatgcacaatctttggtcccaccccagacttactgaataagaacctctgggacagagcccaggtctccgtgctctcacagtccctagcagcatgttcagactacttgaacatataatgtatatatgcctggggtacactgcatggcgattgatacatagaagaggaatctcccattttgcatccattgagttgaattattgaatattaaccttcagctctttggtgtcacagtctcttaactgtttcccatcttctagtattattctgcatgagaggcaaaccctgtcctctctactgtcatccttaaacatgaccagtaggttattctaaatacacttaatactagctcttatttattcgtcagtatgtatgcataccactcgaactaaaaggtcaaccatagaccaaaatattctaaaagagatagagctgacataaatgtaactagctgatacataaccaggtatgttagtctgaagaaaagaggtttatttggcctacaacctgttctggcaggcagtacagcaagcgtgatactggcatttgcttctgttgagggccccaggaagtttggtggaaggcaaaaggggagccagtgtatcagatggcaaaagggagcaagagagagacaggagaggtgccgcactattttaaacaatcagttctcatgtaaactcaatatccctcattaccaccgtgagggcaccaagccttcatgaacgatccacctcccatgctccaaacacttcccaccaggctccacttccaccattgaggatcatatctcaacatgagatttggagggtacacatatccaaactatatcaccaggttcacaaagacctattttggcagtgctttaaaaaccacttaattcatttayttttcagtagtgcagtagagtgggagagctaatgtttcatgaataaaagacaattacaggaacagcatttctctcttggaccaacattcttacagcgtaaattgattgatagaatcgtggaccttgggtccatctggggagctccaaggaaaactgtcatctgttcatagtaaaactcccattggtggaagtgagagtctggtggaaggggagacgtggacccaagtcttagctccctagtgacarccacgtgatcttcatcaaattcttaagcctgtaaatatatgcaactacttgagtcaaaccaaccaacaaacaggaaaaccttagtattttaacagtacctttattcaaggagttcaaaggcccagatgctccaaaatttattagaaactgaggttcaatgattagtacaggaaagaaaaagaaaattctttaagtcttgaagcagattagaagaaaattcagttatgtggatagccatttataattgaaaagtagaaacattactattatttaaatttttcgtattggtgttatttcatgaaattttcgtccatcttgtaggacaaccattaccagtcatggtagatagttatttcattggatgaatgtgttacataaagtttttctgtttattttgckgttacttcttgtgtttgactttgtggaagtgaatcccattttacattttgcattgatgaactatggattctagcaccttataattacaatagaaaagttatgaaaaagtgaaaaaaagaataaggagtacttagcaatgatcttaaacttctaagttttggataaatataaataaggtattaaaaatttcaatttattatgtaataaataaaagacatatttaaaaaatatgattgcttgaacctgggaggtggaggttgcagtgagctgagatcgcaccactgcactccagcctggcaacagagtgagactccttctcaaaaaaaaaaaaacatatatatatatatatatatatatatgtacacacacatatatatacatatatacacatatatacatatatacatatatacacatatatacatatatacatatatacacatatatacatatatacatatatacatatatacatatatttttttttgagaaggagtctcaaatttgtatatgtatacgaatgtgagtaggcaaaagggttagaagaggcaatgggcagtactggctgggtgcagtggctcatgcctgtaatcccaccactttggggggctgaggcgggcagatcacctgaagtcaggagttcgagaccagcctggccaacatagtgaaaccccatctctactaaatataaggaaaatgagccgggtgtagtggcgtgtgccagtaatcccagctactcaggaggctgaggcaggagaatcacttgaacccaggaaacggagtttacgatgagccgagatcacaccagcacactccagcctcctgggcagcagagtgagactccatctcattcattcattcattcattcatacattcataaataaataaataaataggcatactgattcataattcagaaacccatgagtttaagaagccggatcagaagccataacaggcctctacaaaaccaacacaaaggcctgctggaggttgctagggtgttgcaaacaatcataaactgattgtattgagagtgagattctcactgccttataaaagcttgcaggagtcaaacaaaaggacaaaatgaaacaaggaaccacagatttagagccttccaaactattggacaataccatttaaataacgataatagcctttttcttttatttatttattttttgagacggagtcttgttctgtcgccaggctggagtgcagtggtgtgatctcggctcactgcagcctccaccttctgggttcaagcgattctcctgtctcagcctccctagtagctgggactgcaggcatgtgccaccacgcccagctaatttttgtagttttagtagagacggggtttcaccatgttggccaggatggtctcaatctcttaacttcgtgatccgtccgcctcagcctcccaaagcgctgggattacaggcatgagccaccatgcctgggcaataatagcattttttaaaaagaaaaaccaaaaaactcctggcatttgtgtacatagtaaaatcttgtctgtgtgggaaaatgatatgccttacaaactaatcaaagttgctaaagttcaaatgccctccaagtaccttccagtggctcctctctttgaatcttgcttaacctgaatcaggagtratagcatttatatttctaatgacaagcctgctgtgtggactgagcaggttgcacacgttgtacgtagtccatgtgattgtaacttcctttgggttgagcagtatacaacccacgcagctttacttggcaggcctggtaaatggttgtctcctctttcaaaaagtgggcaattttgtatcactctaaacagaatttagaatacggagtgagctggtatggtttacaaggaaaatctctgtgtgaatgatatagttctctaaacttccgtagcatcatttgattgacctctattcagattcaagtcaactaccaattatcagagccagctgagtstgctctatccatgcctaatggcctgttctatccatctgtaaaatgagacctgctgcggcatattcaggtgttctttacgcgaacacattagccttctaatttatcatgagaatcacattttaagaataatagggagtgtgttcagcagataatattgggacaaagccaagatcatgcagaagtctttggaagattttagtttgagtctacatatttgaaaaaaaaaaaaatcagattaggcccatgtggattttttttttctttctcragacggagttttggttttttaggaaattaccttttcacccagcatggaaaaataaaacacccaaagggatataacctggtagctcatcyctgatctttcagtattctatacaaggatccttatcaggcagtttgggaactttgtgcttagtttctgccccttctctgttgatgaaatgtgaacttcctttatcctcagaagacaccactcaagtgtactacattttacctttctggagtgatcatggctctgggtcatctccctaactctagattttttttttttttttttttttttttttttactctttgccaagcagtctcctctctacaatgactcctatatccccttactttctgatatccactctttaaaagccagcaccagatggcaggactaagtctgggctacacaggagctgccaacatcacccagacttctgacagtccatcactgagcaaggcagtattcctgagctagagttaattaggttccatcttttctctctgtgtctttggagcctcaactctttattgaactgtaattatgatatttattatagtaactttttacccattgctttatatttcttcttaattccattattagattattatgttatccttgttaaaaaaaaaagctacaaaaaaatacttcaactaaagtgaaagtttatctgtactgccaccattaccgatccttctcagaactattctgatttgtgtatcttttcagaccatgttttgtgcattaacatgtgtacaaatagagatatgtaatcctgaatggacttttaaaacaatataagtggtgttatgttatatatattgttctgcaatatatttaagtgggcttgacaatgtcttagatgctattttggagagggtcgatacatggattcgcttcattctttttaactgctacatcacatccatggtattgatataccatagtttattcaactagttccctagccatgattgttttactaagttaacttgctacatcaacaatgctacaataaaatctctttctactctctttgtgcatatgtgtagatagacctccgtgctagatttctagagttggaggtgctgggtcaaagagtgtgtgcatttgaaattttaatgaagattgcaaaactaccccttaaaactgctataactactrtatattaattagtatagggatatagtgtatgttgaatagcatggayaaatttgactgcgtatcaatgacaatttgttcaattttttttcattttaattttgtaatatataaaagttagacaggtgaatattttgtcaaagaaattaatataatttctctagttatcctaggtaaaagagatgctagaagaaactaacctatctgtgggtctgttttttgtagtgaaccccaaatatcgtagagatgcccagtatctgcttataaagttaaatgttgatttttatcaaagaatgaaagaaggttttcacaatggcagcctcatcagagtcacatcacagttttattaaaagagtcacctaattaatcttataaacctgagtcgtaaaactcaatctattctcatagatgtcaaatacttgtagttcatataccattatgataggtgaactatatccaatcaaattataagctgacatatgtacaaaatgctcacaatgatttttttagtccatattttactgtcttggcacccaactaaatgatgtgtgaaatatcctaattctattgtctttctttgccagatcagtgaagtaccaggaaagggtcagcattaaaactccaccacattaatcagaaaagccaacttttaaacacatctccagaatgactttagcataaaacagtccctgtatgcctcttaattttttctttttgcacattactactgtatcacatcacgggacattaagcccgtttcaactcgtgggactaactcaatcatgtttttagaaattgaaaacaaatgttgtaactggatraatgataatattgaagtaataacaatttcctagtaggcatacttgtttaatggattgcatagtctttcagcttgtaaacactggaacgtctatcacttactgaaatttaaaaaaaaaaaaaaaaccactaaagtttagcaataatttggtttgctgctgaagtcaaacaaatatagagtttgtgttctgattctcattagtggaatagttgtcctcaccggaaaataaaaagttgattttactttagggataacagagaccaacataatgctagactccatttaaacttgccgttctctttttgctggaattttctgtaacataacataataaatgtactaaattgtgctggcctcagcctgaagcacagggttatgcactccttttttaaaaagatatttagaaaaatctgtctcagtgcttggcaactactctgacagaaaacagataaaaataagggtggtttatcagttttgctgttcttatcatgtttcaagttgaaggctgttgaaatgatgaaaaacaaacagcactaaatagggttccgtcattatcactgcaatggagagctgagtttttcaggatcaaagaaaaatgcatttgcttttagaagtacaatccttcattttgagaggtgcactgcactcagatactgatgggtgaacaaaaaaagagtaaattggagaaggaaacaaaataaatatatgctgctgtgggaacttggaaattcaaacaaaagtaggctgggatacttttaaaagctctgaattttcaacattcaatttcttaaggaaaaataagtgccggaggtttgttatttctcagcaattggagtgaagcataagcacaggttgtttgcatctcatcaaattataagcattactttatctttgtaaacatgtatcaaaggaattttcccatgctgggggcttcggggaaatgttcccctatgtgttattgatctgggagagggcttcctatttttaaagttttttaaattttttttttttataaattttgtcactcgagttgagcaccttcaatttccctggcatggaaattgccaaacagtagagacaacgaagctgttgtcttttccctggaggagagcgccaactggcataaggataataaccagaaaacaaaactaaagtaaggcagttgctgaaaaaatagttataaattgtcaaaagagtccaaggaggaataaatcaaaaggaaatgttgattcagggtgcagcagttgaggtgaatcttgaaggaaagtacatgtcaacagatgagaaggaggtagaaggtccagcgtcacaaacgcccagaggtgggaaagcataaaacatgtttaatttgaactagtgctgaggaacagccaagaatcttgtaatgaaaatattacctgagggccctgcggttttaacagtgagatcaatgcctaaagcatatctagatgaaattkttgaacctccaagttaaagaaacaacccccaattacttggggcaaaaattactattaaaagaccagaaaccagactggcctatgactttgtcaaaggacaacaaagaccgtgaagcaatgtatttagagtttgaagagataatattggagcccagtaatcctgcacaaaaccaagttgttggtcrtatgtaaagaaaaaaagaaacccacaaagggtttctcagatatataaggcatcagaaaaagtrgcatccatgcatatcttatataaagcattattcaaagacatattccagccaaccaatagatgcatcaaaataaactcaagaatagatgagccatgtcagaaagataaactgtgaaacatgtgaggcagaattrttctaaataaatgctgctgatgtggttataagtttaataaaaatgttatagccagtccctaaaatggaaaataactatgtggaacatgccctctttttccctcactgcctttcagccgatggctttctgttagttattcaaatgtgctatgttgtctattctagcacttttttttaggatatcttttcaaaagcttttccaccctctttatttagcaaacagttacttgacctttaggtattgcgttagtctgctggggcttccataacaaaatactccgaactgagtggctcaaacaacagaaacttactttctcaccattcaggatgctggaagtccaagatgaaggtgctggcagagttggtttcaggagaggcctctcttcctggcttttagatgactactttctcactgtgccgtcacacggcctttcctctgtgtatgcatagagaaaaagatctctggtgtctcttcctcttacaaggacatccatcctatctgattaaagctcccaccttgtgacttcatgtaaccttaattacctccctaaaggccctgtgtccaatacagtcacactgggggttagcgtttcaacatatgaattttgagaagaaaaacacaattcagcccataacagatttcagtttcaatggcacttcctcaaaggtgctctaccagcatccttcacatttgcctcacagcgccgcttgagatttgtaattagatgtttattcatgtgattatttaaygtcagattcccccactaaactgtaagctccgacaggaaagatcacgtttgttctgctcattccttcttcgatgtctcagcacatggtaggcactcagtaaatgtttgtggaatagtaggygacagagtcatgaaaatacaacaaatatggatggaagaacaaagttaggaactcttcctctttgtccctggatggtgggaatggatgctttagcatagtcatatgtgctggtaaatatgtaaaaacctgctctctggggagaaaaaaagtagtatttcctgatttctttggtgtaaatattcccatggatgatttcaagctacaaacatgaggtcactagagagagacgatcaccagcacattattagtgtagtccccctctatccgcaggggatatgatccaacatccccagtggatgcctgagtccccagagagtaccaagctcacttgccatcagtcatggcatgtttctgttcatgtatttcacccaaaatttaatgcctttttcatcttaactaagtgcttatcacatactgtggccgtagcttttgcagtttgaggtgcaacagcagaacaatcatgaatttctttttccttcttcacaattgtacatatagaggattgattcttaccatagatcttagcaacctcagcatacgatttctctttctttccttattgaaaactttcaccttttcacttaaaggaagcactttgcagctgctttttggcatatccaaattgcccagatcactactcttgcactttggggccatcaagtaaaataagggttagttgaagacaaacactacaataccagggcagtccatcggataaccgagatggctactaagtgactaacaggcaggcagcctgtatagcatggatacactggacaaagggattgattcacaccctgggctggatggaaagggagggcttgagatttcaccacacttttcagaaargtatgtcattgaaaacttatttctggaattttccatttaatattttcagaccgtggttaaccgcaaataactgagattgcagaaagtcaaaaccacagataaaaggggactactctatatgatgttttcacctcaagagcataaaataatttgaaacaattaagaaacaatgagttttatatattacctttatttttaatatatttatttcagcaaataatccctgaaaatgtaaggattggcttttgctagctctagcacaccactgatggggagttgaagataatcgtggagtttgaatacataacaatttataatttattattttgcagggtaagaggcaaaaagagtctaagatgatttwtcagttttaaacctgagtgtcaaggagagcctgagagtgggaggagcagatttgaaaggagaagatrctgattaagcttagaatctttayttttgatraacttgaagacagtttgaaatatagatctccacttgtgctgaaaaagaaaggcatcactttaggaatcctttggagactactactgagagaaagaaggacagaacttttggagcattatctacattttggggactggcagagatatgtaatccgtgaaattgatacagatggaagaatccagagaggcaggtagagaattagcactggagtcaaataaaaaaaacaaaacgaaacatactgaggcacagtctgaacggatgccagtagatttctgaagatgacatttagagttcatctttgatttcgatttcaaacgtggtaggaattctaccctgttacagaatcaatggaaccgtgatacaggatcatgatacaattattttgggctgatttcgtgtactacctgttttggattattttgtgtctggagtaatgacacaatctccacccttgctaccattaaccccaagggagtatctgatgtttcccatactcccttgactagtgtccttaaaaccaaggatagaaagcttttctaggaacctgcrttagggatagtcaaatgctgccaatgaaatatcacagacgagcgctytacaggaaagtcaccatatttggcaatgactgctgacytaaatggtggaaagcattgtgaagcactgggggtgctgggaacagggtgctaaattttaacacctcagaacctgcatttgagtcttctctgctatccaggtatggcgtgcatgactgtaggacttcagggcagttcccaagtgttgtcagagaaggggaaaggaaaccaacatttactgaatgcttcttaggtgtcaagcactgtggtaggaaggcccttgcctgccatctcatttgccacgatgataaatgtgaacgcagaaagctcctcaggtataaggcacatttattggaaagaaggcagaggaaaggaagagcagcttgagagagtagacgaaagcaagattttaaaagccaaatctcaaatgtttctaaagtaattctgtcataattttcccagcattacattgcttgtttctcattgtcagctttagagactgaatgttttttttttttttttgctatattttaaattttattttattttatttatttattttttttttattaaaatggagtttgtacctagaaagtaactgccttttccattatgtttgcaaaacacttggtatttttaatttagccttaagacttactggataattagactcactagaaaattaacgttaataagagttaactgtcactatcatttaagaaatatgggaatataaggaaggggttaaaatgtctttctcaaggacacacagccattgatgtctgaagaggtaccttaagcctcaaggtcttgcttcaagcgaaaacacttatttaatgtttaaatccctcaagaattcttcatcctagaagaaggtaacacattaagttccaaacgtcagctccttccctatcttccatatgaatagcaggattgggcagttaacaatattttgaattgtgggggaaaaaataggttttgttcaagtcatagcctctgttatttcttttcatcccacaattcatgatttggactcacacgtatttgatttttttcccttattttttggaaaaaaaaaatcaccattatgaaaaggttgatactgtttagagttggagttattcctaccaattttgcaagattctgtagtatctttctgccagaatatagaaccatgcatcatccagacatttgaatggtccctgatgcatattttgagaaaatagtcctgccattatctagaattgacttgatgtatagggctcagttctaaggtttacagtgtggtttccactgggaagaactgcataaaactgtgtccatgagaaacgattcacagctgcaatgaagacaatttagaaagacaacacagaaagaacgaaagatgttacttggagtctcaggacctgccaaacatggagtttgaaagaaacccagaaagacaaatcttttccaggttgagtctgacttaggttcctttaactgcaatctgatggcatatcaggagaccagcaaagagactacttaaagtgattttcctgtctctttattcctgatcaaacactatgcagaggagtcctcgggtactccttacataattccaaacccttgtcaaatgtaggattttgcatggtctgaagagtcctgcttcctaagtaggcttaccttaccgggamgggctgctcattactgcaggcatctcaagccagtcactaatttgtttacttatttcacaaacactgttgagcacttactgcatgctttgtgtagggcacacaaatattttttttaatgcagttcctgctctcaagatgtatgctgttgtttatggatggctgccctaaattaataatataatttggttagaattgtagtaaaggggtatttgagggcaaccagggatctgaggcagaggatgattaaaaccacctgggagggtmggaatggggaatgtcagggaaaactcgccatctaacaggtttctttagaaccaactaaataaaatgagacttcatggatctcaaggaactggaaccaccaggccgactttgctctatattaatgtttgcatcaggttgccaattggtctgtgctaaggtatgtgctatcatttgtaggactctctgtctcagaaggcttttgcatgatatatcaatgtcatgtcaatttgtgggtttatacttgggattggaytcttggcatcagtattcaggagccctctggcataggacataaaaaagtaacctattttaaagtagtggttatatcaaattcccagctagttagcccagtctgtaaaccacagagctcctgtatgcaagctagctttgatatacactgttcagcagttaaataaaggtattattttgtttaaaaaaaaaatgatctcttactgccttgcagccactatgataccaaacagaaactgccatttcagttgagacaggcaccctggtgagcattaactcatttgttttggagttctggtatcttcgttgcaaaggtgccttgccagacctatgaaaatttcacatgtagctcccagagccagcagtgtgattaccaaagccatccgtcctttgttcatactacaacatctttaattcctcatccttcctgtccttcaagtcctacttcaaatgccacatcatatacaaaactaatacatcctttttctttcttgtttagaaatagctgtgtataaagtattatgtcccttcgatacactctgagctctttagagatagcatctaagtcatctttatgtcgtatcccctatttcacttagcagagtacttcattgtttattgaatgaagaaatggacagatcaatgagggatggacaataaatgaacacatagatacacagatgacaggaaacatagcatgtagcaaatgaaggaggctgtctgttgcctgttacctaagatggtaatatacacctattatatacctattcctgttgatgacatgtttaccagcctgataaacmcgcatgatcaggaagagaaagtattttggattgaaccatacttgacacataaatgtcctcagcctgaagggtttgataaataggaagcatgcgaggtttagcttgagactgtaaaaacaatctttatgttttgtacatgggacgaaaacagattgagagagtttgcaagaactatagcctagccagatctggaccaatatataaaactatcttctaaatatggacagactaaatgtttgtatttttttcataatgacttcaaaagttttcgaaataatgttcactttgtattgcatgatcaaggaacatagtgattatggatttaatattttttacattttaaaactaaactaattttactcagtcttttgttccctgtcctctgattatggtgcctagataatacttttgactttagagtattacaaagtcatcccaatagctatttgagtagaagtaatggatgtaaggtctagttaataagaataataaaaatacttttattatgtattgattttctgataggtttatttgggcttttcttctctattttcctcatagtgcgggagttggccggactggttgcttcatcgtcatagatgccatgttagaaagaataaagcatgaaaaaactgtagatatttatggccatgtaactttaatgagagcccagaggaactatatggttcaaacagaagaccaatacatctttatccatgatgcactgttagaagcagtgacttgtggaaataccgaagtgccagctagaaacttgtatgcctacattcagaagctgacacaaatagaaacgggagagaatgtcacaggaatggagctcgaatttaaggtatggtattggatgtgatgtggttattcaggagcaagtcattctgggtttgtctttgagtcgtrgctttactttaacctttcaaatttgtgaagtacaagattcatttgacctttccctcaggtgtatgattataaaatgtattccyccccttttcctcttctattctttgcttcctaacaatatcttgagcccttatgtctcctaacttgagagactatactttcagaaaatatatagaaatccartaggctatagagagygattaggtagatgtgaaaagcagtacaatttgaatagtcatttactttaagtaaacaaaagatttatatctaaaagggaaatctggggtacactgcattcaaactgtaggtgaaaatgatctttgttgggtttttccttttttttttttcctattcaacagcgtctagccagctcaaaagctcacacctcaaggtttatcagtgccaatcttccatgtaataaattcaaaaatcgccttgttaatattatgccatatgaatccacaagggtatgcctgcagcctatccgtggagtagaaggatctgattacatcaatgccagttttattgatggatacaggtatctacttttgctcccctgactatccaaagccttgatatttacatgtgccctagtttaataaccagaataaatttcatctccattcaaagacattttctttctgcataggtcatcatttagtcccttggtatttgtttttttgttattttggataggagttaggagtagtagttatgaagtgtttaatctggccttctgcactcttctttcataagccaattggatatgtaagtagttaataaagaatctgttttgtaccatatttcataaatttaatagattgtgtgagaataatttctagaaaatgaagctgcacatctaagtgtttcttaagtaatttgtatgacaatgaaattgagctattagcattgcgctaaaattcaaataataatgataaagacatacatcataatattaacaagcaatttagtttgcgaagtccccaaaatgtattaaatgctcttatttgattatttaatcttagcaggaatttacctcaattgcattaataatatgttttcgttttttattagcaggttgatgtttatgtatccagtgtgagcttttgcatgttctctaaatactttaacacattmttttcattctctgtaattcagacaacagaaagcctacatcgctacccaggggcccttggcagagaccactgaagacttctggcggatgctctgggaacacaattccaccatagttgtgatgctcaccaagctgcgtgaaatgggcagagtaagtgtgtggcccttgtgtgtctcmtcataagacatttactctgtggagaaatgaagactttgtttcaataactcttgtrctagwtcattttttttgaaatgcagtgcactctgracataatccggaccatcattccttgttagtttctaaatttgtaaagccacatcaagtktttaaatttatgkkttttaaagaaagatctagtgatttgtttccagtgaagcacaagcatggagacaaatgagtagcaggtgtccccgtttgacttatgtcggacttcttttagcatattcttactgccttttgttctggacaggctagagtttgatgtgccatcatttctacttatgaaggaacttgactttcttttcttcctgaggcaaattcttacttgcctacctttcactcccattgaataaagtgttggaaagcaacatagtttttctaaggatataacctggtaatcccagatccacttttgaaaaaagtggtttgtttttttttgaaatacacataaaatagtattagaaatacttaaggtttctactattaatactgctctaccactatgacctaatattatttagagatacctcttagattgacttgatgtaagcattatttcgtatttgcttcagatattttctttctgtcttctttgtgtaaattaaatagaagtgcagctaaagcccaacttgtagagcccccggagagaacaaaaagaatatcagacgaggaaagtaactgacttactctgatttggccaatgactctgcagggtttagccaagtcattaaaatggactgggcccctcgtttccttgacaagtaagattggaacaaatcaattcggaggtttctttctatgtccatactgatggttctcttcattccaaaccatagtggtgcaagtatgctgtggtggtgcaatgtgttattgtcatggccagcattgtccaaggactgatgtaattatttggataacttgtaggtatgaagatgcttaccctatgaaagtattcaattctcaattcaactcgtgtatattaagcagctactatctgccagagaccgtgctggatgccataggcaaatactgaaccaaagsgtttcyctatgaagggagctcatggtttcwaagaggaaatgagtcatatgcaattggaattgccttgaattttgaaattttattaatgggataaggaaattagatagattagatagatagatagataatatacagaatgttctttatactttgcatagtttaacattaatcttctctccttttaggagaaatgtcaccaatactggccagcagaacggtctgcaagataccagtactttgttgtagatcccatggctgagtacaacatgccacagtatatcctaagggaattcaaggtcacagatgccagggtaagttggcacagtcttcaactcttaaccattagctgaaaagkagtctaagatacctctctctctctctctctgggagaagcacttgccacttgactgttgtcccaaagagaaatcattcattctggagaacgtttttttttatgtttaatatgtaagagtaacttttcctctgtctggcaagctttctcacaaaccttagtttggctttcattcaaacataacatctggmagctcaaccttggggatgcacttggtgagtgttcgtgctgggaagtgtttactgattggttggctgtgcttacattcaccttctcagctcatgctctttggagcttttttgacttcttcattacttgaggctctaaatatgttgttgttttgcaaagccctttaggtcatatggacccagaggttaatttggtatgattttaaaaccgcagagcaaatggcattctttagaaaaatctgacaagctttgcacattctaatttgattcctggcatggcttattcctcagtgtgctaatgtgtctgtccatgagagctgtgctcccatgacccttgttggctaattttcatcctgcatttcttatctggattgttgagtccaaggttcagccctgatgtaagatgttctatgcataaactctgatatcttcgcctttggccactttcaacccatgattacaaacacatcttaagggagaccaggtcagttcaaagacctgccttgtgtttggaactgtcacagtgggtgggttgaataaaactccagggtaaagctatttagttgatccattgttttttctggaaagcagctttctccaaacttaggtttggagattgtctgctaatccccaaagcctggccctggctgttgaccttaagtgaaagagaaattggttagcaggagggttggcctaggtgacagacctgttaatcccagaaagttatattaactattctgaaggtgacagtatycaaggcagcagttaaatctctaggtcttgagtgtaacctgccccaccgtttaaaaaaaaaaaaaawagtgctctttcagaatttgaagctaggtatgtgagtgaaaatagaaagtgcattttgagtaaactcaccaactattcctggtgataaagaaaaggcaccaggccccaccaatggcagagacacctttcctattccacacatgcacaacttaaatctgatcacaataaacaaaagaagattgaaaccggaagttgctcacctttttttttttaaagtctccctgtgattgtataattttcttagctactacatttgctgtttgtctgtgctcctggagtgtaagtcctgaatacatgtgcagaacatgcaggtttgttacataatttaattatacatgtgccacggtggtttggtgcaacatcaacccatcatctacattaggtatttctcctaatgctatcgttcccctagactccaaacccgcaacaggccccagtgtgtgatgttcccctccgtgtgtccgtgtgttctcattgttcaactcccacttttgagtgcagtgtttggttttctgttcctgtgttagtttgctgagaatgatggtttccagcttcatccatgtccctgcaaaggacatgaactcatccttttttatggaatactcactcaccataatattccatagtgtatatgtgccacattttctttatccaatctatcattgatggacatttgggttggttacaagtctttgctattgtgaatagtgccacaataaacatacgtgtgcatgtgtctttatagtagaatgatttataatcctttgggtatacactcagtaatgggattgctgggtcaaatggtatttctggttctagatccttgaggaatcaccaaactgtcttccacagtggtttaactaatttacacacccaccaacagtgtaaaagcattcctatttctccacatcctccccagcatctgttgtttcctgactttttaatgatcgccattctaactggtgtaagatggtatctcattgtggttttgattkgcatttctctaatgaccagtgatagcattttttcatatgtttgtctgccgcatcggtgtcttcttctgagaagtgtctgttcatatcctttgcccactttttgatgaggttgttgttttcctgtaaattcgtttaagttctttgtagattctggatattagccctttgtcaggtggatagatagcaaaaatttcctcccattctgtaggttgcctgttcactctgatggtagtttttttttttttttttttgctctgcagaagctctttagtttaattagatcccatttgtcacttttggctttagttgccattgcttttggtgttttagtcctgaagtctttgtgtatacctatgtcctgaatggtattgcctaggttttcttctaggggtttttttttttttatcgttttacatcttaggtttaagtctttaatccatcttgagttaatttttgtataaggaagggatccagtctcagttttctgcatatggctagccagttttcccaacaccatttattaaatagaggagcctttccccattcttgatttccctcaggtttgtcaaagataagatgtttgcagatgtgtggcgttacttctgaggcctctgttctgttccattggtctatatctctgttttggtaccagtaccatgctgttttggttactgtcgccttgtttgaagtcaggtagcatgatctctcaagccttgttctttttgcttaggattgtcttggctttgtgggctcttttttggttccatgtcaaatttaaagtagttttttcccattctgtgaagaaagtcattggtagcttgatggggatggcattgaatctataaattaccttgggcagtatggccattttcacgatattgattcttcctatccgtgagcatggaatgttcttccatttgtgtcctctcttatttccttgagcagtggtttgcagttctccttgaagaggtccttcacatgcctaggtattttattctctttgaagcaattgtgaatgggagttcactcatgatttggctgttattggtatataggagtgcttgtgacttttgcacattaattctttatcctgagattttgctgaagtttcttatcagcttgagatttggggctgagacaatggggtcttctaaatatacaatcatgtcatctgcaaacagagacaatttcacttcctcttttcctaattgaatacccgttacttctttctcttgcctgattgccctggccagaacttccaatactgtgttgaataggagtggtgagagagggcatccctgtcttgtgccagttttcaaagggaatgcttccagtttttgcccattcgttatgacagtggctgtgcgtttatcataaatagctcttcttattttgagatacgttccatcagtacctagtttattgagagttgttagcacaaagtggtgttgaattttgccaaaggccttttctgcatctattgagataatcatgtggtttttgtcattggttctgtgtatgtgatggattatgtttattgatttgtgtatgttgaacaagccttgcatcccagggatgaagccgacttgatcgtggtggataagctttttgatgtgctgctggattcggtttgccagtactgaggattttggcatcgatgttcatcagggatattggcctggaattttcttttttgttgtgtctctgccaggttttggtatcaggatgatgctggcctcataaaatgagttaggaaggagtccctctttttgtattgtttggaatagtttcagaaggaatggtaccaactcctctttgtacctctggtagaattcatctggtcctggacttttttggttgctaggctattaattactgcctcaatttcagaacttgttattggtctatgcagagattcaacttcttcctggtttagtcttgggagggtgtacgtctccaggaatttatccatttcttctagattttctagtttatttgcatagaggtgttgatagtattctctgatggtagtttgtatttgtgtgggatcagtggtgatttcccctttgtccttttttattgtgtctgtttgagtcttctgtcttttctatctattttgttgatcttttccaaaagccagctcctggattcattgattttttgaagggtttttcgtgtctctatctccttcagttctgtagtgttcttagttatttcttgtcttctgttagcttttgaatttgtttgctcttgttactctagttcaattgtgatgttagggtgtcgattttagatctttcctgctttctcttgtgggcatttagtgctataaatttctctctacacactgctttaaatgtgtcccagagattctggtacattgtgtctttgttctcattggcttcaaagaacatctttatttctgccttcattctgttatttacccagtagtcattcaggagcaggtggttcagcttccatgtagttgtgtggttttgagtggttttttttttaatcttgagttctaatttdattgcactgtggtctgagagaccgtttgttatgatttccattctttcttttgcatttgctgaggagtgttttacttccaattatgtggtcaatgttagaataagtgcaatgtggtgttgagaatatatattctcttgatttggggtggagagttctgtagatgtctattaggtctgcttagtccagagctgacttcaagtcctgaatgtccttgctaatattctgtgtcattgatctratattgacagtggggtgttaaagtctcctattattattgtgtgggagtctaagtctctttgtaggtatctaagaacttgctttattttatgaatctgggtgctcctgtattggggtcacatatatttaggatagttaactcttcttcgttcattgatccctttgccattatgtaatggccttctttgtctcttttgatctttgttggtttaaagtcatcagttttatcagagactaggattgcaacccctgctctttttttttgccttccatttgcttggtagatcttcctccatccctttatgttgagcctatgtgtatctctgygtgtgagatgkgtctttactctttatccaattggccagtccgtgtcttttaattggggcatttagtccatgtacatttaaggttaatattgttatatgcaaatttgattctgtcattatgatgctggctggttatyttgcccattaattatgcagcttcttcatagcgttgatggtctttacaatttggtatgtttttgcagtggctggtaccagttgttcctttccatgtttagtgcttccttcaggagctcttgtaaggcaggcctggtggtgacataatctctcagcatttgcttttctgtaaaggattttatttctyctttgcttatgaagcttaatttggctggatatgcaattctgggttgaaaattacagtattgttaaacrggtaacctttaaatgaagtcaggcagtctctcctccaaatagaaggtatttgcacacatgacctcttcttgctattgaaagcaactgtggtcagaaatgaaatccccaggacattcagaggagaataaatctgtattacctagcttctgggtctccttcctgtgctttccaaatcttttccagaaacagagggaagtaaatcatgcttccatggtaaccatccataaagtacttatggggccaaatagttttctctatttctcagtattcccacacacttggtgtcatcttcctgtttatctscatccccaaataacatcagtcaggaatctggcatgtccctgtgaaaaccaccaggcgaggtgatgagtgctcatctcacactgagatcctctctcttctcaatatgagtgaatgataaaggattgagtccctgttcacttaccyagaaccttgggaacatgcacacgtgtatctaaaaaaagtttgatgaggaaataatgtgttaacagaaacaatggaggaacaagttgaaggctctttaatgagaagagaccatttaggagtaggacctcttcaaatgagaaatgagatcggtctctctaagcttggattatttctctctgctgatgagtcaggggagaaggttgatgggcaatgtattatttctgcttctataaacagaggctcccttccacttttcttgtacttctagaaacaccttaaatttccacaagggatcagaagatcagaaatgccttagtgtcttcttttcaacccagatatacttcgtgagtcagagcagttttacctaatcactctaaaaaagaaagactgctcttcaatctggcttttttttctaccttttggtttatctatgttaaagctctccacagactgttaattcctgtggtcagccagggagagctctttttcagaaaagggcatttgtttgctaatagtcgttggtatccttgagggatgctttacttcccacttaacagcacagtcatatggttcatgctatgtcccctgccatggctagaaatggtattcctctgagacatggggggcatccaggttaacagcaactaccgggtttgtgtcagatactttaaatttcaccatttgtcatttgacaacggtagaaatacgcaagcacagcagatgtgaagttattgcgacaactgcaaaagctctggtctggatgacatgcctaggtgcttgtttcaatatttattacaaagtaattagtttctgaaatttttgaaatggaatatatatgttccattttatatgttccattttggaaggaatgcagacatgatgaatggttacgaacccccactttgggtctcagaaacatttgytaatgggggaactatgtggatggctactaacgagaaccaggtttttaactgggcactgcaagagtaaataaatttaggatttcaagagtaaataaatttaggatttaaaggtatgtgagtgtggacaatatttatagcagataaaccataactamgtttctatttaaacwtgttcctaactttttctaccctttttgttttcgggaaatgaaaatgattgttcttgtggtccgtatgcttgctgaatcctcctggcgtcttcctttgcggccgggtatgtggctttccttctaaaggacggccagtcccgaacagtaaggcagttccagttcactgactggccagagcaaggagtgccaaagtccggagaaggatttattgacttcatcggccaagtccataaaacaaaagaacagtttggccaagatggacccatttcagtccattgcaggtaagtttccatttgtgaataaagcagtgataagtggtggtgtttcttcattgtctgtatacactttttgtagtaagtttgcttatttgaaattttattcttggcaatgtattacaaaacttaaagcaggattgatttctctttcttttcataaagtgaaaataagtgaaaataatcagaggaaaatgtttagccccaaaaaaatgtttatcccccaaaaaatttgcttcctattagacaaaccaaattaccaattttaccttaatgggaattgttggtacctcccctagtaataattcgttgttwatcatttcatatttgcttttgctttcatagcaatgcactgataactgtctttcttctgtttgtgaaaamctcatgaatagctatcaaataaatcctaatgacaatattaakttctgccagtcaataagtgcttagtatggtacctcagttaaaaaatgcaatttgcttgaaaattgttgctatatcagaaaatgaagcaccttcaagttaattattttcaatagtttctagagcattttataactcaagtcattgaagttaatagaaataaatagcaagtaaatagttsagacattcaccataaatttagtgtttttggaagttgctatgcaaaaaccttctaacaaaagcaattcatctaattttatttaaactaatatattttagggttctggcaacttgacatctaatctttttatggtgaaactcttgagagagtttattaaaaaatatattttgcttcagcacatcaaagaaaactatagttctttacgacatagaaggcaggatctcaaaataggacaaatattagacttgggctaagatagctgtgttctaatctcaattctattatttggctctatgataatgaagtttctctggacttcagttatcttagctgakgtttaaagtcccttctagcatcctttgtttctcaggcatgttataagaagcaaacctttatctatgtacatttgctttctactttctattgagttattaaacatcctttgcaaaccaaccaaagagcttgtaggaaatgacacatggaatcaaatacaggcatacctcagagacgttatgggagtttagttccagattaccacaataaagggagtcacacatactttttggtttcccagtgcatataaaagttgtgtttactttatactatagtctatttagtgtgcaatagcattaggtctaaacaaacaacaatgtacttacaagagctggaaagatggctgaataggaatagctctggtctgctgttcccagtgagattgacacagaaggcaggggatttctgcrtttcccatttcatctcattgggactggttggacagtgggtgcagcccacaaagggtgagctaaagcagggtgtggcgttgcctcacccaggaagcacaaggggtcaggggatttccctttcctagccaagggaagcmgtgagagactgtaccacgaggaacagtacactctggcccagatactgcacttctcccgcagtcttcacaactggtaaaccaggagattccctccagtgyctggcttggtgtgtcccacccccacagagcccagcaagatacgatccactcccacagagcccagcaagatacgatccactggcttgaaaatctcactgcgagtacagctgtctgaggtccacctgggmcattcgagcttsgtgaggggagaggcatctgccattgctgaggctagagtaggctgtttgttttaccctcacagtgtaaacaaagccagcaggaagttcaaacagggctgagtccactgcagctcagcaaggccaactgcttctctggattactcctccctgggcagggcatctctgaaagaaagacagcagccccaatcacagacttacttacagataaaacccccatctcactgggacaaagcacctggcggaaggggcagctgtgggcacagcttcagcagacgtaaacatccccacctggcagctctgatgagcgcagcatttctcccagtgcagtgttcgagctctgataagggacagactctctcctcaagtgggtccctgacccccatgtatcctgactgggtgacacctcacagtaggggctgacagatacctcatacaggagaacactggctggcatctggcaggtgctcctctgggatgaagcttccagaggaaggaataggcagcaatctttgctgttctgaagcctctgctgataatacccaggcaaacagcgtctggaatagacctccagcaaacctacagcagagaggcctgggtgtttgttagaaggaaaataacaaacagacagacagaaaggaatagcacgtccacccagagaccccatctgaaggtcaccatcatcaaaggtcaaaggtagataaatccacgaagatggggagaaaccagcacaaaaaggctgaacattccaaaaaccagcacgcctcttctcctccaaaggatcacaactcctcgccagcaagggaacaaaacaggacagagaatgagtttgataaattgacagatgtcagcttcagaacgtgggtartaacaaactcctccgagctaarggaccatgttactaatttaatgcaaggaagctaagyacctggaaaaaaggttagaggaattgctaactagaataagcagtttagagaaaaacataaatgacctgatggagctgaaaaacacagcacaagatcttcgtgaagcatacgcaagtatcaatagccaaatcaatcaagtggaagaacggatgtccgagattgaagatcaactcaatgaaataaagcatgaagacaagattagagaaaagagtaaaaagaaatgaacaaagcctccgagaaatatgggactatatgaaaacaccaaatttactttgattggtttacctgaaagtgaaggggagaatggaaccaagttggagaaaactcttcaggatatcaggatattatccagaagaacttccccaacctagcaagacaggccaacattcaaattcaggaaatactgagaacaccactaagatattcttcgagaagagcaaccccaagacacacaatgaatcatcagattcaccaagcttgaaacgaaggaaaaaatgttaagggcagccagagacaaatgtcggcgtgcccacaaagggaagcacatcagactaacagcaggtctctcgacagcaaccctacaagccagaagacagtggggccaatattcaacattcctaaagaaaagacttttcaacccagaatttcatatccagccaaactaagcttcataagtgaaggagaaataaaatccttttcagacaagcaaatgctgagagattttgtcaccaccaggcctgccttacaagagctcctgaaggaagcactaaacatggaaaggaacaactggtaccagccactgcaaaaacacaccaaattgtaaagaccatcgatgctgggaagaaactgcatcaattaatagtcaaataaccagcaaacatcataatgacaggatcaaattcacacataaccttattaaccttaaatgtaaataggctaaatgcccccaattaaaagacacacactggccaattggataaagaggagtgaagacccatcagtgtgctgtattcaggagacccatctcacatgcaaagacacacataggctcaaaataaagggatggaggaatatttaccaagcaaatggaaagcaaaacaaagcaggggatacaatcctagtctctgataaaacggactttaaaccaacaaagaagggcattacgtacagaggtcaatgcaataagaagagctaagtatcctaaatatatatgaaccctctacaggagcatgcagattcataaagcaagttcttagagacctacaaagagacttagactcccacacaataatagtgggagactttaacaccccactgtcaatattagacagatcaatgagatagaacattagcaaggacattcaggacttgaacacagctctggaccaagcagacctaataatacacatctacagaactctccacccaaatcaacagaattatacattcttctcagcaccaaattgcacttattctaacattgaccacatattggaagtaaaacactcctcagcaaatgcaaaagaacagaaatcataacaaacagtctctcagaccacagtgcaatcaaattagaactcaagatttaaaaaaaaaaaccactcaaaaccacacaactacatggaagctgaacaacctgctcctgaatgactactgggtaaataacagaatgaaggcagaaataaagatgttctttgaagccaatgagaacaaagacacaatgtaccagaatctctgggacacatttaaagcagtgtgtagagagaaatttatagcactaaatgcccacaagagaaagcaggaaagatctaaaatcgacaccctaacatcacaattgaactagagtaacaagagcaaacaaattcaaaagctaacagaagacaagaaataactaagaacactacagaactgaaggagatagagacacgaaaaacccttcaaaaaatcaatgaatccaggagctggcttttggaaaagatcaacaaaatagatagaaaagacagaagactcaaacagacacaataaaaaaggacaaaggggaaatcaccactgatcccacacaaatacaaactaccatcagagaatactatcaacacctctatgcaaataaactagaaaatctagaagaaatggataaattcctggagacgtacaccctcccaagactaaaccaggaagaagttgaatctctgcatagaccaataacaagttctgaaattgaggcagtaattaatagcctagcaaccaaaaaaagtccaggaccagacgaattctaccagaggtacaaagaggaattggtaccattccttctgaaactattgcaaacaatacaaaaagagggactccttcctaactcattttatgaggccagcatcatcctgataccaaaacctggcagagacacaacaaaaaagaaaattccaggccaatatccctgatgaacatcgatgccaaaatcctcaataaaatactggcaaaccgaatccagcagcacatcaaaaagcttatccaccacgatcaagtcggcttcatccctgggatgcaaggcttgttcaacatacacaaatcaatgaacgtaatccatcacatacacagagccaatgacaaaaaccacatgattatctcaatagatgcagaaaaggcctttggcaaaattcatgagccctttatgctaacaactctcaaaaaactaggtactgatggaacgtatctcaaaagaagaagagctatttatgacaaacgcacagccactatcctacagaatgggcaaaaactggaagcactccctttgaaaagtagcacaagasagggatgccctctctcactgctcctattcaacacagtattggaagttctggccaaggcagtcaggcaacagaaagaaataaatgttattcaattagaaaaagtggaagtcaaattgtctctgtttgcacatgacaacattgtatatttagaaaaccccatcatctcatcccaaaatctccttaagctgataagcaacttcaggaaagtctcaggatacaaaatcaatgtgcaaaaatcacaagcattcctatacaccaataatagccaaatcamgagtgaactcccattcacaattgcttcaaaaaagataaaatacctaggagtccaacttaacaaggaatgtgaaggacctcttcaaggagaactacaaaccactgttcaatgaaacaagagaggacacaaatggaagaacattccatgctcacggataggaagaatcaatatcgtgaaaatggccatactgcccaaggtaatttatagattcaatgccatccccatcaagctaccaatgactttcttcacagaatgggaaaaaactactttaaatttgacatggaaccaaaaaagagcccacaaagccaagacaatcctaagcaaaaagaacaaggcttgagagatcatgctacctgacttcaaacaaggctacagtaaccaaaacagcatggtactggtaccaaaacagagatatagaccaatggaacagaacagaggcctcagaagtaacaccacacatctgcaaacatcttatctttgacaaacctgagggaaaacaagaatggggaaaggctcctctatttaataaatggtgttgggaaaactggctggccatatgcagaaaactgagactggatcccttccttatacaaaaattaactcaagatggattaaagacttaaacctaagatgtaaaatgatgaaaacccctagaagaaaacctaggcaataccattcaggacataggtatacacaaagacttcaggactaaaacaccaaaagcaatggcaactaaagccaaaagtggcaaatgggatctaattaaactaaagagcttctgcacagcataaaaaactaccatcagagtgaacaggcaacctacagaatgggaggaaatttttgctatctatccatctgacaaagggctaatatccagaatctacaaagaacttaaacaaatttacaggaaaacaacaacctcatcaaaaagtgggcgaaggatatgaacagacacttctcaaaagaagacactgatgcggcagacaaacatatgaaaaaatgctcactatcactggtcattagagaaatgcaaatcaaaaccacaatgagataccatcttacaccaattagaatgkcgatcattaaaaagtcaggaaacaacagatgctggggaggatgtggagaaataggaatgcttttacactgttggtgggtgtgtaaattagttaaaccaktgtggaagacagtttggtgattcctcaaggatctagaaccagaaataccatttgacccagcaatcccattactgagtgtatacccaaaggwttgtaaatcattctactacaaagacacatgcacacatatgtttattgtggcactattcacaatagcaaagacttgtaagcaacccaaatgtccatcaatgatagattggataaagaaaatgcggcacatatacaccatggaatactgtgcagccataaaaaaggatgagttcatgtcctttgcagggacatggatgaagctggaaaccatcattctcagcaaactaacacaggaacagaaaatcaaacgccgcatattctcacttataagtgggagtggaatagtgagaacacgtggacgcagggaagcgaacatcacacaccagggcctgccagggggtgggggcctgggggagggatagcatcaggagatatacctaatgtagatgatgggttgatgggtgcagtaaaccaccctggtgcatttatacctatgtaacaaaccagcacttttttctcatctaccccagaacttaaagtttaaaaaaaaaaaaaaatgctaatcatcatctgagcctccggtaagttttaatctttttgctggttgagggtcttgcctctattttgatggctgctgactaatcgatgggcggtggtttctgaagggtgaggtggctgtagcaatttcttaaaagaaaataataatgaagtttgccacatcaagtgactaagtgacaaagtcaagagccttctctgcaccatgcaatgttgtttgatagcattttactcacagtagaacttctttcaaaattggagtcattcctctgcaaccctgctgcttttctattaactttgtttatgtactattctaaatcctttgttgtcatttccacagtgttcacagcatcttcrtgagtatattccatcttgagaagccactttctttgctcatccgtaaggaacaactcctcatgtattcaggttttatcaygagattgcagcagttcagtcccatctsctggctccacttctagttctagttatcttgctattccaccatttttgcaatttcttcctctactgaagtcttgaacccctcaaagtcatccatgaagattggaatcaacttcttccaaactcctsttactgttgataatttgatcttctcccrtgaatcacaaatgtttttaatggcatatagaatggtgaattacttccagtaaattttcaatttactttgcccagacctatcagagaaatcactatctatctatagaatgtatagccttataaaatgtagttcttaaataacaaaactttaaagttgaaattcctccttgatccattgggctgcagaatcaatattgtgttcacaggcatgagaacattaatctccttgtacattccaccagagctcttgggtaacaaggtatgttgtcaatgagcagtattatcttgaaaagaatcttttattctaagcagtaggtctcaagagtggccttaaaatgttcagtmaaccatgctataaacggatgtcttatcatccattctttcttgttccatttatagaactgggctatttggtacaagaggtcgagctttcagcctgtcttgatgttcaacgtgccttccttactaaaacttaattttttcaagcttttgacttaaaatgagagatgtataactcttcctttcacttgagtatatttagtgtaattcttgagagccctaggattttcaaatggtaaatgagctttggcttcagcttaatgtcaccagctgcatgagcccctaacaagagagtcagcctgttctttgaagttctgaagtcaggcattgactcctcctctgtagctatcaaagtcttagatgacaacttcttccaatataatgatgtttgtctacattgaagatctcttttttaatgtagccaccttcatcaatgatcttagctagatattctggataacttgctrcagcttctgtaacagcacttattgcttcaccttgcacttttatgttatggggttggcttccttccttaaacctcataagccaacctgtgctaacttcaaacttttcttctgcagcctcctcacctcccagccttcatagaattgaagagagttagggccttgctctggcctaggctttgatttaagggaatgttgtaaatgatttgatcttctatgcaggcctttaaaactttcttcatatcagcagtaaagctgttctacttccttatcattcatgtgttcactggagtagcacttttaatttccttcaggaactttgcattcacaactaggytgtttggtgcgagaggcctagctttcagcacatctgggctttaagcttaattatttctagyttgtgatttaaagttagttagatacacgcgactctccctttcacttgaacacttagaggccattgtagggttattaactggcctaatttcgatattgttgtgtctcaaggaatagggaggcctgaggagaaaaagacagatggggaaactgctggttggtgaagcagtcataacacacacatttgtcaattaagtgtttgttgtcttatggtcatggttcatggcaccccaaaccaattgcagtagtaacatcaaagatcagtgatcacagatcactttaacagatgtaatagtatgaaaaaatttgaaatattacaagaattaccaaactgctacacagagacacaaaccaagtatgtgctggtggaaaaatggcaccaatatacttgttcaatgcaagattgacacagacgttcaatttgtgaaaaacacagtatctgcaaaactccataaagtatagcacaataaaacagtgtatacccatattcagacaaagtagatggtatatattgggattgaattacctggatatttcttttatctttactcataatttgcccaaatgctaatttaaacttttctaaaataatctctaaggaaaagagtatctttaatttaatacatcttcttaactttaggcatccttatatgtataggtacataaatgtgttatgtgtgcctgttctcattgtttttgtcataaaataattttaatattcctttagtataatgctaaaggaattgcgatgcatataccttttatatatatatatatatatatatatatatatatatatatacacacacacacacacacacacacacaaagaagacttctatatatttcctcttatttaggaatgttctgaaaataccacttttcttatttataacttattaaagtaagatgataaaaccagtaaattgaaaagttgtgagtccaatgtctgttctttttttgaaaatacttagtagaaagtaacccaatgtttttgttgcattcgagctatcaaatcaaggtaagatagactctggcaaggtaagatagactctggagtacctagatcattcaacaaaaagataataaatctcagtttctcacaactaagagagactttcaaggttaaaagggaccttcaaggtcatctgcttcatcttaacagaaggtttcactgccgctagacatcttcaatcacttcttaaagactgactccgcttggattttcaaacctcacttaacatttctgtttagactgtagaaaccccatttataaagggacacactatttatatatgcctgtcagctacaccctccagtaaatgaatccatctattttctacagcccgtgcccaagtgttacacatgctgtttaattaggatccaaaaatgcagggatttttcagattattcactgtttccctcattatctgaacttcccattgctttcctscttaagtgcacaagagctatgaattaattttctttcttgctaccgtgaagattctggarttatcttaaaacaatgaagacaacagagagaaactcaaaacctttctaatgtggttttagttgctgatcatgtaaaaatggtagctaagttcagagatcaatggctcttaaccatttttttttaagattagagacccctgtgagaatctgttgaaagttctaagtctcaagaaataagaaaacaacatagtatttacttcatgtgtacgtacacttacaggatagtcataaaccctcctgaagactaagtgaaaatcacgtatataccctgttatascatctcttttctcataataaaaccagtgtaaacatttgactagttataggcaaatacatttaggttatgggcatcgcatatgtattttaagtaactgcaaaaygtgaacagtgtgatagaamagttgaagatgccaaattcacttcaccttattctgaattatttcatactttaaaaatattaagtaggcaggttgtaaatttcagaatctccatraatattataaacctatatgttatttaccctttcttttcatttgttatgtttccttggtctttctaaaatggtataaatccccattgaaaagaccttttattagacttactcctaattacttcatcctcattatcacatgctgttacaactcagtatcccaagagtaatcatttgatgaatgtgataccatgttttcctgaatatggctataaagagatayggagtgtggaagctggtagaagtatgtccacacccaagcaaatgtggccaagactgtgaacatctcacccagtaacatcgcctttgttattgtggcagcgcgggcgttggaagaactggagtcttcataacgctaagcattgttttggaaagaatgagatatgaaggagttgtagatatcttccagactgtcaaaatgttaagaacacaacgaccagctatggtacagacagaggtgagaaaatccattgcatttttcrcatctcaagagcctacgttttgctagcctggacctcccggactccatactctctcaacaccagacacaaaatactgtggggaaagcatcaaactgtttaataattttgaacctcattttccccctttttaaatgggatgagattattagtgtcttagtgttgctatagaaattatgtgagattatatgttagattgagctatgttaaattttactactggaccatttttgaccaataaaatggcaatttcataaaattcgttatattcatagtcctatartataaatatataaatatatagaaagcataatatttagtacataatataatctcagcccatttaacttctccattctccctctgtatgcctacagaggtatcagctcttctatatttcatgtcttaacaatggccattcaaaacattttgattctggataagcctagagatattaatattagcccctcatttcctattccaataattaatatggaaatttggatatttctcgtaataataagagtttatgatatagccagtctggtctattgagcattcatttctaaagataatattactgatagagtttatgttctgcaaaaggccaccaaattatacaacttatatgtgttcctcaattcatcatccacagtatctttcagacggatttcaaagtagtgcaagtgtttggcttgcaatagtcaaaacattatgccagcttgacaaacttaatgggtcttaggggttacagagggaaattggacatttaaaaagccttaacactcagccaagcaacttactgtgacaagataggaaagtaaacaccatttattttgcattaccaaccatttttattayagaaaaatgcacatttaagcaaaatagaaactatctgtctactttcagcccgattggccactgaaaataggtttcttttatggggaaaatccttttyctcatccctatagagakctgtaaattgtgatttttccatctctccaacaatgcttcaatttattccaatatgatagtgttcttcgttgtctgaaaaaggccatgcttcatactgcttttttttagtgtgtgcctctctaaaacagacaactagcaatcacacagaattgggctgaatttacaggtattttttgatgtgggcagccagtcctgtgaagccattttcagggatggaaagcttggaagtccagtgccctgtgtaaatggatttgtgtgcctggtgtgccgcaccagctaccttctggctgtatatgaacatcatatgtaagtgagagagacagccaaagggtagctgaaatgactgtgagtgattctcactgcaagctctactgtccaaacataattttttaaaaattcaaattctgttggcagtagttcagaagataagtaaattcagatttttctcaggacagtttgtgtctgtatcagcctctcttaaatatttaaactgagaattagttatcttgaataagcagataattgtaaaggatgattttcatcattatctgcttataaggcatgtaagaagtttatgtgttcaattggtggtaatggtttgayactacttggaaaacacttgtctgggaaggtaatgttcactcgacctgccactgcttggaattgggagatcgttttagtcaaattgattggcaaagttaatcaacaccccatgtggctttttctttgttcactataaacaattggtcattggattagaccagttgacgaaagtagtgattttgcccctatatagatgttattttgttatgcaatattgatytttatttttctattaaaatatgctcatggtcccttcttttgcttctccccattcattgtctcctgcaggatcaatatcagttttcctatcgtgccgcactagagtacctgggcagctttgaccactatgcaacgtagaaacccctgacccattctsgatttttactacaggcccttcaatatccatggagtctcttctgagccatacagggcacttgagaagtccttcttaacttctagctaacaactacttagtgggactattacacacaaaacaaattaaaaacaaattattccaggtggaccaagaattcacagtttaataatctaacctgaaaaataatgaagagaatcctgactgatgaggcatctgaaggattttatttacagatacctcaaggattcaaaatcaagggaagaagaaatcacagcaaagaaccaccatcttattcaggattgcttgaaaggtgcaaggagaaattgccagaatgctgcagttcagcacaagatatgtgctggtgtggcttctcacaatgaaacggactctgctttgacatcgccccttcccaccatactgctcataataacattttaggggsmaaggggagggaatgtttaaaaagaaagtccttgatttagttttttagtattgtaaagatactgctgacctgtgcttcatttctaactgtgtaaacttttttttaacaaaatgtatcattcgataaagtgaattttaaaaaagttacataactcttcatttttttatttccaaatcrtaggtttttttaagctgtagaactgttatctgtaatatcttgctgtagaaatatcaaatcatttgaaaatttgcacatttttgtgcaaaactcaatctacagtatcagtctcgtcagatatattaattttacacttcagttttgattggtgagaaagtacccattctcttcaaataatcaaagataattattattttgttttgtttttggaatcaacagggaggcgcaaagtataaagttgctgctaacatatatacatatayatccatattttataagggtgtctatgtatatatagacagtgtgtccacacaaaaaatagatacagttatcagtcagtcagttcttccatgatttagtttttttaaacgtagaaaagctattgtaaacatctctttccatttattcttaattttttgacatattggtatttctttaaagggaaatgaggaatgcacatcagtgattgattgtcaaacctcaccccctgatttcctacctaatctacccccacctaaccaatcaatcacatccacaaattgttttgtttgtttgttagtcaggcttccaacaaagttcaatatttctaacactctagtgcaataaaaattattattaaatagctaagaggtgtgcatgtgggaaaggtcagtgcatatccctttaggaggggagaatgttgtaatatatcagctatcgagttgtttaaaaaaagtgtattcaatcgtatattgtctatagtatgtgctatgaaatttgcatttatgatatgtaacaggggcaaagccaaattcatgttactctgttcagtcagaaacattttgtggcatacagcattcctgggaagtgctgtactttgtttcgttttggttttagttttgcatttagagtgccttataattgatgcctattttaatagcatttctttttagcttttggttcgtatttccattcactgttcgtatctgttactttctattaaagcattatctgtttaccacatgtacaaaaactctttgaataatatgcattcctagttttcagccaagtcggggatgttagtgattgtaccagcccaaagcacttggataatcagggcccttcttccttttataatcaatcatcaacatcagaaaaagctacttgttttatttatattcccttccaaatccgctctggaacatgcagtaactgcaccaaacttattttagtaacaaatatcattggcaactttggaatatatttgatattccattaggatttttctaaaaggggaaataaactatatatatatatgtatcttacccccaattcttccaacagaatttctataggaagccatggatgatggcataagtttgccacatattacatgattttaaataatcctcaaaatacccaaggaactcttaaagagttttggtatgagtatactactttggtttaattttagcttcatggatgttctgcatggaaggatttttgttttccacattttcccattgctagcagagtgaaatccaagagaccaaacatttgcaagcattgtatttgagcacttttgtaaaaaacaaagaaaaagaaaaaaaagaaaatatatataatactaaaaaaaagtatctagaaggctacctcagaatgagactctctaacctacatcagaaccagagaagaatgtgcactatgtgggtctgttatcattattttcttttagtttgtatctttttggagatttatccaagtgccagattactcagtgctataattttctttyagttaaacaaagggggtcagacagacattgcatcatccagacatgccttgttggacatgtagaatccgatggagcactgcacaccagaatgattggccaatgagcagcttctctccctgaaacaataactgcccatttggcaaagggaaagatgacaataatcagaagaagaaaatgaatgggatgcataccatagacgaacgaggcggagactattgcgggaatcttactgttcaggagctgttcctagaactaactcccttactgtcattgatgtgcattccactctgtgcttttctgtacaaccattcaagttttaatttcccaggtgaaccatctttatctgccattaccacaagctttcaagtttccagttattttcatcatcataaccagtacggtgctattatttacctatgtacgtgtagttatgtataattttgtaattagttacaatggtaaaaaaaatcaaaatatataaaaagtgatttgtacagaactttattttagctcttttttaaaaatgatttgcatggttagaaaacggcgaggacagccaggggagggaagggcctctagggaactttgcactttctatacctttgtactatgcactgccctattgattctacacccaataatgatattacttgaacccatctgtaagaaactgcttcggaaattcatttgtgtgtatgtaaataacacaacatagaaacaggaagggaaaaaagtctgcagtaatgcacgtattttttttctttcctgtttattttcggttttgctttaagtccttttatttttaattccctttttgtttttctttttgggttttggttccttttgggtttatgggtgccctgatactccagcagagatcagaaggctacagatccattctatccatccgttatgtggctttgccatcccagcttggagtgtctttacaaagataataacagttgtgttctttgctctcgttttggatgcatagactgaaaaattaaaacaaataacttgtaaaatggcttgttaaaaaatacaattacctctaattagtagtacgcgtaaatgttttacagaatgaaaggcgtgctttttattttcttacttcgttacattggtggcgaaagaagtctgtatgaaaatcagttctttgctgacacaagttccatttgttacaaatgaattctaataaaaatgtcagtgttatgcagccctggcctttgcttttgtccatgcaaacactttggttttgaactgactatttgttctctcttctcttctggttatctagttagttccttgtactagtaagaattctgtttaccgagagactactgtttacaaatatctaccttgaggtaagcacttttcactggtaagcaaacagagactcagagaaatagtttttccaagttcacagaacaaagaggcattgctttcattcatatcagagatcacaggcaatctttgattctgtggaagattactatatagaaatttaagtgcacaactgtatatatacatctatatgtatgtatgtattttcatctcgaaacaactttcatgcacataaaaatagctccatagtgttaatttattcatacctttgggaacatggctaagaaaatacttggtttgcgttatttattcagtaattcaatatgatcaagtaccaataatgggtcagaattgttctaggtattggaaatgcagctctgaacaaatgagatactgctgctgtttgcatacagactacagtctactgagagaggttggcactgaagtaatagtaacatcacatgggaccagtgctatgaaggaaagtgtaggatccttgaagttaggactttcaattgtgagtgacagaaagtctgactcaaattggtctacaggaaaagaaaggcgtttactgactcatgtactaaaagattaggaatggactcatttactagaagagtaggaatacatcatcttcaggcataacttgattcagggctcagtgatgccttcaggacgtgatgtctcttcccatcatccagcctgattctactttcacagtttcaattttaaactccctttttgtagtccctggaagctttgggatcataacaccacagagcagacaagtggaagagtttacttcccccaacaacacaaccaaaagtcctagaatggagtgaattcttcttgatcctaattgaacctgtcttggggtaagcgatgatctcaggaacacaagtatggacagaaggcgagaatgtgtgcattgagttatcaaatccagaagggtttaaggtggctgtccctttgccaaaccccagtgaatattgtgggaccaacaactggctgctgatcagcctaatttgttaacataaggcaaagcacaggtatgcttggtaatgttaaaactacttgttagaaatgatgacagaataaaacaattccattatccaaacattattttggaaatcctgttattgaatgaacaaccagactcctctttttccacttcacctaattggcttttacttttgcagatatgaccaccctattgattgattgtgtaaaaacaggacagagacttcgaagtgtatcagatttgatattttgttccttgtgattcataactttaaacagatatctgatagaataccaagaataacaaatatgatctgattgtatacatgtacacacacacacagaattaatagttaataataactataagcttgggactttcacttaattgtatccataattaaactttatgagaattttaattacaataattggtaaaattatgaatctgagaaatatttaactttataatgtttaaaataatttctgcaaattctgaggaaataggcaaagacctgtgaaatcttgtgtttaataatacaaaaagacttaaaatatgtaaaattgtgtatgtgtaaaaatgttttacagttatatatacaatacatatatgtaatgtatatattacatgtaattttacatatattattttacatacacaccataatgccatttataatgcattagcatttcactattaaatagtgttttggaaaaaagatagctacattaaaaattattataatatacttttcaagaagggatataaaattatgtacacatcttaaagcaaagaagtgactggaaagaaatataattattaaatgatactgtgtgataaaattttgttgctgcacttcgtacattttctaaaatttttacaataagtatttcaaaatagcaaattgtgggtgctttgaaatatgtgagaagatagaataatttttaaaaaatcaatttacaaggcaagaatgaagagaaaagagaatctaggacaggagggggcaaatagaaagtaatatgggagatttaaaatttaaaacagtaattacttcaaatgtaaataaagtatattcaacttaaagatgcagatttttagcctagctatataatgcttgtaagaacatgaggctactcaaagtaaaaggatgcaaaagatataccatggaaacatagccaaaagaaagctatactgagttatattaatatcagccataccattaccaaataataaaagggtcagtttccgatgaaaaacttcaatgcaccaggaagatgtgacaattatatgtgtgtatgaacctcataacatggcctcaaaatgtagacaacaaaaatagaacttaaaggagttacatacatatctacagctatcatgggagattttaaacgcttctcttattaacgtataaaatgaacaaaccaaataaaacttcagtaagggtataaaagatatgaacaagctgattaacaaaatttacctaagtgagctatgtagacgactaaattcaataacttaaaaatatacattatttataaaagcatttaaaacatttacctaaattaactagaaattggaccataaagcaagtctcaacatatttgaagagttgtaataatgtgaaatatgttctttggccacagtaatagttaaactagacatcaataacaaagatagttagaaaagccctctatgtagtaattaagaaataacttttaaaagccaatagctcacagaaaaaaaatcccaatggaaataataaattatgataaaattatgaaattatatcaaaatttatgggttttacagtgaaatttatagctttcaatgcatatgttagaaaatgagaaaggctaaaagctaatgatcttattttttacaaattaaaaaaacaacagctaattgcccctcaagaaagaaggaaataaaaaagacaagagaaaaaaattaattgcaaacaattattcaatagaggatagcaacaaagattaaagttaaaagttgattatttgaaaggcaatgaaattgataaaccctagcaaaatgatttaaacaaaagcaatggacaaatcattcacatcagaaacttgaaaggagtatagtgcttcagctcttaccaatattaaccattataacaaaggttccatgtcacataaatcaattaaaaaaaaccagaatatccaatgtaattaggcattaggcctaaaaagatacttcacagaaaaaggatagctaaattgctcaaaaatatgtgaagaagtactcagttttacaagtaatcaaggaaatgcaaattaaagctacaatgtggcacagctacatgctcacaagaacagctaatattaaaaagactagcaataccaagtg

SEQ ID NO: 95326 - DNA, 22146 bp, Homo sapiens
actacctcatcactcacattgaccagttacaatgtagccaaagaacattttgttttcagtgcaattaataacccatgtggttccttgtaacactttttaaaataataacctaaagtaaaagaaatatgcattaattttctctctaatggcctttctaaacctctgtgaggccctaatttgatcatggcacagtacttcctgatcctggacacatacccaggaccatttccctgtaattcctaatccagaatccactactgagaaatcccaaatgtcatctttcaatggtatgatttactaatgagatgtaaaagttaaggataatacaagtttttcatacagctaggtacattcaattttctttttactctgagattatgctctcacacttgatgttaaaatgtccttcttaatgaaatggaagtgtgattgtaaatttttttggaaatatccttacttggaaaaataaacatcaggccccatgttttttacattaatttatgaaatacataagtcagtgagcctccccttaaaagatatcttcttttagtagtgcttttacattttagaaatttctttttttttttgagacagtctttctctgtcacccagcctggagtgcagtggcacaatcttggtttactgcaaactccacctcccggggtcaagcaattctcgtttctcagcctcccaagtagctgggattacaggtgtgtgccaccaagcctggctaatttttgtgttctagcagagatggggttttaccatgttggccaggctggtcctgaactcccggcctcaagtgatctgcctacctcagcctcccaaagtgctgagattacaggtatattttagaaatttaattgaaaagaaacggtaagagaatatgacatacatgagaactgcctagataccttattattagtgacaatgttgctgttgtcactatggctacattcttctcctagggacatggaaagattggacatccccacctctgaagttaaggcatgccaaatggcctgcttggctaattaaatataagacaaagttatatgtatttctcatgggtagaaatgttaattagagcatggcttacttttgccatgccaatcaacaacactccagatggggcagggtgccaggctaggtttcacagtgagaagcctgtactaagggatcaggaacagatctcaggtgacccatgatagacaggcagcacgagagagaaatagacttatgctagtagccactgaaacatcaggactatttgttaccaatactgaagagtagaattgcttttcaacagaataaaaaatctgaggatataaattcccctacaatttaaaaagaagcaaaagatatgaacacatgcttcaccaaagaaggcatgttaatggcaaataggcacatgaaaagatgttcaatctcattacccattagagaaatacaaagtaaaaccacaatgagataccacagaacacttatcagaatgactaaaaaaaatacggacgatacccgaatacaaaaatacaatttaactggatctgtaatacattaatagtgggaatacaaaatgatacacccactctggaaagtaatttggcagtgcattgataacattaaactcacacttactacgtggcccagcaatcacacttctagatatttaccttgaatagtggttggcaaactacttccaccggtcaaatccaacttttattttaagagtgttgtacaaccgggcgcagtggctcacacctggctgcttcctgctggttgtctgctctcaaaccctgtctcctgataagatgttatcaatgacaatgcgtgcctgaaacttcatcagcaattttaatttcgtcccggtcctatgatctcgccctgcctccatttgccttgtaatattttattaccttgtgaagcatgtgatctctgtgacccacaccctatttgtacactccctccccttttgaaaatcactaataaaaacttgctggttttgcggctcaggggcatcaaggagcctgccgacatgtgatgtctcccccggacacccagctttaaaaatttctctctttgtactctttccctttatttctcagatcggccgacacttagggaaaatagaaaaggactcatgttgaattatcaggtgtgggttcccccaataaaggtggtgccatctccacaaaacaagctgggtgaatctccaggcccagaggagaggctggcagagatgctaacaactggaaagtatgaagttttccccatgagccagggaaaagaggcaagtggtcacccagctcatgtgcaattctgaaaggctttctgcttcaggcatgtttctaatcccactgattgagctcctggagtttttctgttttggagttagacttggccagaactgctcccctacttatggttgacagatgcaatacaggatgcccactcacatttgtatttcaaataaacaaccagtgatttattttgaagaataagtatattccaaatattgcacagaaaatgcatgtactaaaaattaattcactgtttatctaaaattcaaatttaactgggcatcctgtatctatatttgctacagctggaagctctacatgacccagcatttgacacagcttttcatttttctgagaatgtaaggggttcttaggttatgttttaaggaattgtctgaaattatagattgcctacatccttgcttcatctcactaagtgcttacagttacctccaacctctgaagctgattaaagtattatagcaaagagtaatataattcatttgagtttcattttctccctactcagctcctggaatagtgtactgcaaacagaatggccttaaggccatctaaatagaggaagggggaaaagaagttatgaataaaccatatttatcaatatctgaacaatctggatttgattccagttttaattatgtggacttgttagttcttcctcttgcttcggtttcaagtattgaacaacaaataagtcatttacaatacctctaagctaaatattgattcaaagaacaaagaccattacaattcaactttttcaacacaggcttagctcactctccaatgggtatcttttttttttttgagaccgagtctcgctctgtcacccaggctggagtgcagtggtgcagtctcagctcactgcaaactccacctccagggttcaagtgattctcctgcctcaacctcctgagtagttgggattccaggcatgcaccatcacgcctggctaatttttctatttttagtagagtcagggtttcgccatgttggcctggctagtctcaaactcctgacctcaggtgatctgcccaccctggcctcccaaatgctaggattacaggcatgagccatcgcgcctggccgggtgtgttttaaaacagtgtgccgagtcaaaacgtcttttagacatattccttttttttaattttatttatttatttttttttttgagatggagtctcactctgttgcccaggctggaatgcagtggtgcgatcttggctcactgcaagttccgcctcctgggttcatgccattctcctgcctcagcctcccgactagctgggactacaggcacctgccaccatatccggctaattttttgtatttttagtagagacggggtttcaccgtgttagccaggatggtctcaatctcctgacctcgtgatccacctgcctcggcctcccaaagtgctgggattacaggcatgagccaccatgccctgcctacatattcctttcgtaaaaagcaaacaaacagagacctgtttaagggtagtaaccagcatgctggattttactaacaaaaaaagagtttggaaaccccagttacaaattttgcaaatgaatcacatttgaggcctgaacaagttagtagtttgcaaaaaggacatctaaagcgcgttaagagttggaatctcctctccatgctcagaagcaaacagtgacagagttgaaagggaggttcagggaagaattagagggggagagtatattagctttatcttgggtacccaatatatcccaagattataggataccttatttacatccaacattacattaaccctgtgagattaataaaaaacgaaaggctcagaagagataagtattagaaaagttacacagctattagggggcagtttaaattcaaacccatatatttagaattccaaagcaatgcttgtcaaatatagacttagcaccaactttattcttataatcactaaatatatttatttaattctcctaacctcatgagaaagtactattgagtaaaaacattaagtgagaataagagcagtgtttgtagtcaagatcacttttcaaattatttggaacttcccatcttccctggatctattttcaatcccagtcagtcatctttgggtccagaagcatatcctcccccatctcccagccctccccctctagcacacaacgcactggagaaaactgctaaggcattgctgaatatctaccactctactctgatggcacacagggccaaaaagattatagaataaaatctaactgaaaaattataggtgatttttataagtctgtttaaatgcatatgcatcccaggcattccacctggcagtctctgtctcaagggcccatccacctcaccatggtctggagggaggggatgaggaatagggaaagccaaagaattgatcttttctgagtttgcatccagaacatgggccacagagaaatggtgaacaaagtcacccattattattaacagctatgatttattcaacatttccctgttgccaagcattaaataagctgttttatctccccacaaccatgaggtagataatgttaagatccccaattcagacctgaggaaaagcgtgatatgaaacagagaaagattctgtaacctgccattgcccacagctactgggacttggcacagggttcaaatacaggcagcctgacttctctctgaaggatgtcaagccacagccaccatactcacctagtccccacataatgatggcccaaggaactcgcttcctcaatttttgcttagttttactcattcattctttcgagaaatagaagaatgccagacactaggcatacagctatcaaacagtgagaaaacaacaggccccatttcatgtgccttagagtgtagtgaaggagacagaaaatgccaacaagtaaacacgcaaaaactaactgtcaatggttgctctaaaggaacacaaagtgccatgagcaaggaaataggagggacctacttgagatgacatagaaagtcaaagaaggcttctccagaaagggggcatcaaagctgggacacgaagaaagagaatcagacagccagacacacaagagccgacaagatctccagaaggagtgctgccatggggagcaagtgtggcatggccctggggtgcaggccaggccgggggcagggactgaagcaagttgtgaaatttctgattatcaggggcagaatggattcctaaggcagccactgtcttctgttaactctggagttttctgcatcccttttgctttaaatgaggcatacatgttttcatagctgtgatgaaacccctacaattctccagtttagcattatttattttactcttaaaaaataacaaagctgaccctggcagatgtttgtactgggagattcagatccatccaggcccccactgttaatagcccacgggaaagtccctgcagtctctcagggaagtcattctgtgtagaatctgtaatttcacaggcaagtcctgcaactttttaattgtttaaaattcccagaaggaataattactgaaattatctatgaagggtttaatggacacagacatgagagctataaacaatgtgatactatgtcctgttaactcacagagaacggaagggctggaacgggacccagccagcagggtttgtgaccgcctctgctgtgacgtcacagcctggtgaggagggggctgcagttcctcaggaaactgccagtggacaaattcataaacaagagctccagttccctggaacctgagtcgggagacctgcagctcactttctccctgtttgctggccagcagggtttgtggccgcctctgctgtgacgycacagcctggtgaggagggggctgcagttcctcaggaaactgccagtggacaaaktcataaacaagagttccagttccctggaacctgagtcgggaggcctgcarctcactttctccctgtttgctggcccagacaggcctgtgctagagggctggatagtgtggtagtgtggtggatagagtgctgcctctatccacaacrcagccatatgctgactgaagataactttgtgtctggaagagccctctgatttcttacactaatggccttacacgasatggaggattttacatttgatggaacaaagcgcttaagtgtcaactacgtgaagggaattcttcaaccgacagacacctgtgacatctgggataagatctggaacttccaagccaagcctgatgacctgcttatttctacctatcctaaagcaggtaggtggaagggcttgcaggggaaggggaagaggagagttaggaaggtaagtggaagtatgcattagtcatgaaataaagaagttgatctggaaaactctggacagagtgatatggctaaggaaagttactagtggaaactgaagctataccgaaacatactaaaatgacatacaaatttttagaattcaatcttcctatgatactatgatgtacttcctttttttttttttttcactttcccaggagagagtgaaaacagttaagagcaaaagggtagacttgtttatttattcattcccaatctaggcccttattgtagatcttgtaaaaagctgctttgagtgtgtgagctagaaaggtgatcctgagtctgatttgggaaagaaataggggagctttggttctgcaatgctgatatcacctcagcagccctcccatctcagggtctgagaaccatccttctgatttccaccttcctttgtggtaagttttgaaccaactgccttatctcaacaatcagtttaacaaagttgtctgtaaaagtaggactagcttaagccgagccaccacgtcataaaaattgggtgatgatgaggtggaaatagttctctataaatatttttgcatatctacatatctactagaaatacattactgggtccacacacaaattgtatatacatttgctctttgcaaaatcaagctgtcaaaaactcttgttatacacacacaaacacacacacatcaaaaaatctaaacctcagtattttctgagactgttcaaaatcctcttttgttcttatctctcaagatcctgacagaagattctgcaggcacatggaggccttggtctcttctttgtccatctgtttcattttggtcctgatttcccaatcttactcatcaggagcccattcaggatcaaatttttctgaatgtaaatttctaaaagtagccactggtgaggatcacatctcatcatcttaatttcattgacaattccacttgattatcaattcaatacataaataatcttttctctatctgccaaacgcaagtacaaagatatggttcatttaggtttttcatggcattaatgaggtttaagcaattcaaaaagcacactaagaaaattaaatacttgccatctaaagtaatatttaatcataactaaaaccatatacattaatgaaggctattttattagaaggaagaagaaacaagcatagatggcaaaaatagttcaccctaaatttttaaaagaataatactctgaatgacacaagaaaaaaatacatcatagaatcactggcctctagagaataaattgagaagtcattccactcaccccggagcctctagcaacatttgaatctgccctcatgttggctcatgtctataaattcattcaattcattcattatagacattcagtgttatggctataaattcccataaaactagtacaaatggctggactattctttgcatggatagctaaagatatcttggccctttgtcctgtaataaaagttgctgccagaaaatacaggagaccaactactataaaatataaaatgtaatttaatttttttctaacctatgcccttattctaggcctttaaaagcactaaattgagaatatgggaaaaggaatctatagagtttcggccagataatacaggaaagatcaacctagatcaggattcagaaagccatcctggctaggcatggtggctcacacctgtaatcccatcactttgggaggccaagacagggggatcttttgaggctagaagattgagaccagcctgggcaacatagggagactcctatgtacaaaaaaaaaataaaaattagccaggcatggtggtgtgcactcacagtcctagctatttgggaggttgaagcaagaggaccattgagcccaggagttggaggctgcactgagctaggatcccaccactgtactccagcctgggcaacagagcaagaccctgtctctggaaaaataaaaaataaaaaaagccatcctaaaataactcaacatcctcctaacctggattttgccagaacatctggtgcaacagatcttcatcaaagggtgaagattatgttgatagcacaatatcactgtatcagtcaggatcagtgcaagacacagacagactgaagctgggggataccattctacctatggccacagtggcagtggttgggtctagggcactgggccatggaacgtggaatggtctctgcaaaatttctatctgctggggctactatcagcagccacyacctcaggaaggatgacttctatctccccactgccttccaaaactcaggctaatgcatctcactggagggatctaaatagccttcagaatcttagtggcaaaggagtttagggaaggccttttacagcctttcagcccatgagatatgggggaaacagagaaaggcgaaaaattgaatactaagtgctaatggtcaatatcaagttcaagccctaatggttcactcattcagccaacaaatactaagtgtctcctacgctatgcaactgggaaaaagagagtttgaaaatcatgtagtcatttctctatagcagatcacaatttggggagaatgtcctttctaaggacaatacagctaaataaatagaacaataataacaatccaaattaatagttgtgacagaaaaaaataaatgtatatttatcagtctaatgtccattcaaaattggagtatttttttaaaatcatattatgataataagatataaataaggaatgctatcttctgaatcccatttaaaacctagcttttaaattcacatagatggtccaggcatggtggctcacacctataatcccagcattttaggaggccgaggcgagcagatcacttgcaagcagatcacttgagctcaggagttccagatcagcctgggcaacatggtaaaatgccgtctctacaaaaagtataaaaattagccaggggtgattgtgtatgcatgtaacccctgctactcaggaggctgaggcgagaggatckcttgaacccaggaggcagtgagccaagattgcaccattgaactccagccttgatacagagcaagaccctgtctcaaaaaacaaaacaaaacaaaasaaaacaaaagacatagatgttctaacaagtatttgatcatattttaaggaatgtactatactagatgtctattcatcttcattttacgtgcacgtaaggaacaacatggactcaggagatagtggaattaatacaaaatgaaggtgatgtggagaaaagtaaacgggcaccgactcatcaacgatttcctttcctcgaaatgaaaatcccatccttaggatctggtgagtataaatagccacacttcactacagtcctaaaatgcacttaggatttttactgtctttgcacctttcgaaattataggctttcaaacaattattggtaagtttcatggttttgtctttttttaactgtgtctggccattgttatactccagacattttctaatggaattactgtttgtacaaaagtgagttaaattttgtttctctagttagaaattaattttacttcaaaagaataagctcaagtaagataatcctggtgaaagggtttgaattttttaggttcttatttatttggatgactgttatggttaggaattgttctagtcaaaacatctattcataggctagacgtattctctcacaccagatctacagttacaatgttcttatagatgctttgaattgtagtagtaataatggaagcagcaagacttggaagcaaatagataaaaaaaaaatcgtagaaattgatcgaaaaccagttttgcaggtttggaacaagctcatgcaatgccctcaccacggatcctgaaaacacatcttccctttcacttgctgccaccatccttgctagagaaaaactgtaaggtaaaaaagcaaaaggaattcagagttgtactccttaaaacaaccttagtcttccatttcctcttaaaacacttcacttgttaaatatatatatatatacctcttcacaataatcaatatgcaaattaatatgaatcctagccaggcacgttggctcatgcctgtaatcacagcattttgggagactgagatgggtggatcagttgaggtcaggggttcaagaccagcctgaccaacacggcgaaaccccatctctaccaaaaacacaaaattcacaggacgtggtgacacatgcctgtaatccaagctactcaggaggctgaggcaggagactcgcttgaacacaggaggcagaggttgcagtgagccaagatagtgccattgcactccagcctgggtgacagagcaagactccatctcaaaaaaaaaaaaaaaaaaaaaaaaaagtctcccataaccaggatgacaagaatgcagcctcagaaaaaatgaactgtatgaaatgtatctaccctaacatgacttgcctgggcagtaacagcaaaaaaaaaaaaaaaaawttcctgtttttttgcttcttcccttcccctcccctcatcattcccagataatctatgtagcaagaaatcccaaggacaacatggtgtcctattaccatttccaaagaatgaataaagctcttcctgctccaggaacatgggaagagtattttgagacttttctggctgggaaaggtgagagaatttagctttgtttcccttcgtttctcaaaatctccaaacaccctagaaggaaagaatcttttcttttgaccagcaggggctctgccttctttaatggaacaytctcacttctcttcaggaattctcctttcagtggtataataggacctctgtgactcattgtcctgttttccatcccatcctccagtgtgctggggctcctggcatgaacatgtgaaaggatggtgggaagccaaagacaaacaccgtattctctatctcttctatgaggacatgaagaaggtgagcacagtgccatctaaggtgtacccactggaccataaaacatttaagtcataatgcattgaccccatcagggactcagattgatgcggggaaccgaaaattgctgcacttcattggttacagctgtcatttgtcaaagtgcrcatggctgatcatgagtttaagtatcacacagtctcacctgcagcttcctggtgctcccagggatgctgcacatttcccttacaggcaggttattacacaatatggatggtgtcattttctcccttgcatgtctattttaaaatgcagtttagcaggaaaaaaaatcctagcacattttggtttctttggtttttgggttttttttgtttttgtttttktttttgagacagaggaggagtttcactctgtcgcccagactagagtgcaatggtgcgatctcaagtcactgcaagctccgcctcccgggttcaagagattckcctgcctcagcctccggagtagttgggattacagtcgcctgccaccatgccagctaattatttgtatttttagtagaaaccgggtttcaccatgttggccaggctggttttgaactcctgatcccaagtgttccaccctcctcagcctgctaaaatgctaggattacaggcatgagctaccatgcccagagtttttgtttttttattagcactgaggaacataatactttatttatttatttatttatttatttattttatttattttttgagacggagtctcactctgtcacccaggctggagtgcagtggcgcgatctctggctcactgcaagctccgcctcccgggttcacaccattcgcctgcctcagcctcccacgtagctgggactataggcacccgccagcacgcccggctaattttttgtattttttactagagacggggtttcaccgtgttagccaggtctcaatctcctgacctcgtgatctgcccgcctcggcctcccaaagtgctgggattacaggcgtgagccaccacgcccagccaatagctttaagaaactttaagaagtggtgcaatggaaaatactaatgatttagattcaaaattattgaaatcaagttctgtcaattcttggtaaagacacttaacatcttgggaaattagttttcttaaatgtaaaaatgaagataataatatttacccattcaagatttatttgaggactaaatgagataatatcagtggatgtttattgtaaataatcatctactcagctattttctgtgaccccactaaatacagagatctatacagaattacagtgtctgttcttgaattggtcgttgaaagccttgatactcaacaggtgcttcacagactagttgcatgagctactggagcctgctgtaggcctgctaagtctggagttttataaaattcccaggagattcaagcacacatcaccatttagatgcacttctctaaggttcaatcactgctgggccttgtgatatgagtgagttctacaaaatatcaaaggagtggaaaacacagactattttcatgtggtttttaaaataattgttatagctctaggattctcagaagcatgatcaaagaaccagcagaacaacctatgaggttatcagtataaaattcccttctttgtgtttactttgtttttacttggtacaaaagtgttgtgccaccatacgaagactccaggcagatgatgtttccctacagcatgtatcatagccatgtcagagaaaggatatgtcgctgggaatggggctcttttgtttaggtagaccctagcgtattatgcatgccaggaagaaactttatcgaaataggtaatctaacctcagagtccctaaaacttttaaaaatattgctgtgatcttgttcttgaatgtcccctcactgtagttcccacaaagctcacaattctcagcactctctgattcctagcctgtgtgaggtcaattaaatgaaacatttttgacatacaagcttttaaagcagaagcccactatagacacagtggtcagggtaagcgcttccactttccttccccacccgccctctgctcctagagatggaggcgtcccacagccacagtgatgtcacaaggttgtatgtccctttgatgcgaaatcagtagctacactggaactcagctcctctcagttccacttgacttggtggtctggtaccagagtcactagccatgagtgcctcttgaggcatgcaaaaaaaaaacttctctcctctcctcctgccatcactgcagtctggggacatttctgtcaatgtcagaaacaggatgtagcttcctctgtgtcaggtcttaaatcttctgcccctgtgcttctgaaatgccttgagcagggcttgtggacataaccctgacacattcccttagtgaaccattcactaggcactgtatgtcattgtctggtgaatgtttcactaaccctacccagttgattacatattaaggggaaaaaattattagtgattccaattactaaaaaaagaacaatatgggtcatcacgttaaaatgagtcacttgagcatttgttaagatttgttttttattttagctcgtaatatgttaccggttactgtcattaatccatcataatattctttttaaactaattctattaaatcattacttttcttttgactctgatcatagaacccaaagcatgaaattcagaagctggcagaatttattgggaagaaattagatgacaaagttctagataaaattgtccattacacttcrtttgatgtcatgaaacagaatccaatggcaaactattcatcgattcctgctgaaatcatggaccactccatttctccattcatgagaaaaggtttttatagtttattttcattataatcttaaaagaactgtcaaatattttaaagcatttgaggagttttctttcctgtgtctaggaaaaataatatctgtaataaatgatttggggaaaagaagtatttaagaagccactgataaaatgaaaatcgcgtttaattagccaattattattaagattaagagagtaagatttgatgtccaaatccaaccacttatccccactttcccttaagagttctggctaataacatgaaaatatatagaattaagtcagatagggcaaagaatccattttatagacagttctatgctatcagattcagtcattcaaaggtacttactgaggggcttctatgtgccaggcactgttctagccactgtttgcagcagtgaacaaaacacaaaaattcatgcctgcgtggaaattatattctagtgataagcaaaataaagaatatatagatagataacattaagaaaaacgaaactgggaaaggtaacagggattacaattagagaatttgtggggggaggtcttattttttcttcttcaaatggtaccttgggcctcccagaaataggcccttcttggtcagtttacagcatgggagctacagtcatgagcacccaccatgcttcaatgtgcaacagggcacagggaaagacaagaaagcccttcaggcctgctattgtaacatggcggtctcgccyacccactaatgcaaccaggtggcaagagactctccttgtctcacagatcagacaagaaagttgtcttctcttcaggataaggaagtgacaggatagcaagagaaayrttttgtccaatactgcccttcctagaacatggcatagaaatcatcatacagaaacaggagaatagggaagcacagactcttccaacagctactgaacctctcccacrtaactgtatttcaggggcagtgggagactggaagaaacacttcaccgtggctcagaatgagagatttgatgaagattacaagaagaaaatgactgatmccagactaactttccacttccagttctagtaaggaagaaaaactgaaaatgttttagtttattacccagtatatttgggtaataatgaaagtttaattctcataacaaatgatatcagattccagttatcagaatagtttaytgtgtttgctcttattcactctactaaaaaattattttaaaaggctggaggcaaggtggtgacaggcagcagggtggcgacatggagagagggaagctcaataaatcactaggtacaatcctggtatcattgccaattatcatcatatttacattttctacaatcatgtgcttattaacatattggaaatgcttcagtcctcacatgataatacactaacattttcagattaagttttggttcaagttaatttttttttttttttttttgagacggagtctcgctctgtcgcccaggctggagtgcagtggcacgatctcggctcactgcaagctctgcttcctgggttcacgcyattcccctgcctcagcctcccgagtagctgggactatgggcgcccaccaccactcccggctaatttttttttttgtattcttagtagagacgaggtttcaccgtgttagccaggatgttctcgatctcctgaccccatgatccacccgcytcggcctcccaaagtgctgagattacaggcgtgagccactgcgcccagccggttcaagttaatttttaaatgcatcactaacgtgtaaatagtgactgtttgttccagcaattttttggtggtgaagtaaccatcaagtgattcaggttcctcttggaaccctccaagaaaaacttcagggtcctagtgtaatacatctgtccccatctctcactggcgtatatatttaactggactcactctcccaccctcagctaatgctacaatcctggagtcacctcttgactcatctttcccattgccaccacaatccattctaatatgtcagaaaatctgtcagttttaatctacgaaatctcttaaaatatttccgtctaaccattccttgttttccttctatttctatagccacccttctggttcacaaaccttttacttcttgcctcaactagtgtaatagcttcctaacccatttctctctatttcagacagatggcaaggttattttccttaaaaagactcttattatgttgttccttagctcaaaatccttcaatggctgaactttcactgcctgaaagataaatcccaagattttagccatgcattcaagagcagctataaccataatgactccagccttcacacttccagcttcaccttccaaaccacctccatattccagcaaattagcctacttactgggtcctagtcacatcttaccacttcctaccctcccagttttatttataccaagcctcctcctgaaatttctcttcctttctttctacctacccaagacataccacgtgcttcaataaccagtcccttcctcctacaaacactacaacctggaaagcactcttgcttttctgaagtcctctatacttagtgtaactcttctgtgatgaagattaaagtgtattatggcaactctcatgtttctgtattgtctctctttgcttattttaatttttacttttttttctccaagacagggatattgctgtatatttcactgcacgccaaacagtatataaaacactcaaatataaatggctgaaaaaacatgtcagggaaatttttaaaagctaactcttatatttcaagtagatagtccctaaaagcacgctaatttatagctatgatgttcaatatgctagacactagtcacgtgtggctatttaaatttaacttaattaaaataaaataaaattataattcagttcttcatttttaccagccaactttcaattgctcagtagccatgaatggctagagggtatcatattgggcagtgcagattctaaaacatttctaacatcagagaaccttctattggacaagatttttttttttttttttttttttttgagacaggctcttactttgtcgccgaggctggattgcagtggtgtgatcacagctcattgcaacctccacctgctgggctcaagggcaatcctcccacctcagcctcccaagcaactgggaccagaggctcacactggctaatttttgtggagcagagtttcaaccatgtcgcccaggctgatctcaaacccttgagctcaagtgatcctcccacctcagccaccagagtagctgggactacagacatgcaccaccactcctggctaattttttgtttctgttgtttttttgtagagacaaggttttgccrgttgccccaggctggtcttgaactgctgggcacaagcaatctacctgccttggcctcctaaagtgctgggattacaggcatgagccaccatgcccagcctacctcttactttcctgaaaatcccctctatacccccagcaagcaaaaccaatctctgtggtttagttacttagctccagccccaactagaccaactcagtttggtcttcacttggcctattctctcaagtcttttgaaactagtgattaggatattgtattctagatctattcaagattatttccatttcatcagagaattaaaataatgcatttagactttgtaacctttctgatacattgagtctgtaaatacagggtacacatttggtgttttgccacaccagagcaataacctttgacttctgtggaggaggtctggacttgaaccaaaaaaatattaaaggaaatcaaagctcatgtgtagagatgcaataggtaacctactgcaataatataagtattatgattctatgtaaagtatttagaaactcatacactttggcaatgttaagagattttatatgactgaaaggcctcaggaggccacctcaatcctatttatttctgaataaccagtgggaacataattttaaaaataaatacacatcatactgtttcaaacttaaatccagcgtttgagaaatgaaaattcaccctataattagaaatacctcatgaaacagaaaattacatagtagatggtttctgtaccacctaacttgaagtgctaacagaaacaacagcatactcaggttgggtgccactgagaacaaaggtggctcattacagcaccagagaaactgcactattggaggcaaacaccagggagagcaagacatgatgagctcctgatgaaaaacagacatacctctttaactgacagtctgtaaagaacagtagaggtgaccgttttttcaaatgcccaaatctcagcaaaagatgacaaggcatacaaagacacaggaacacacagcccaaccaaaggaacaaaataaatctccagaaaccagccctaaatgttacaggtagttagacaggcatgcgtggggcaggagagacttcttcccctacccaccaggaatgttgggccatcatcaggtaatggttcaacagttctcgcattgcctctctaaaaatgatcatttggcagccagcaccagggagagacaatctactgatggtccacagctgtcacattgaagtgttaattgaatgcaggcaccagtgagaagcaacttcccaaagagataaaaacacttgagattgatattaaaatctcaggaactgggcaaatgagcccaggcatgcacattaagagacaaaatggcagagtatgaccttctgaggggactccaccagaaaagagaagaaagcctcagatggggatgcatacagcttcctaaacacactgctcatgctcacttccaagcgtaacaagggcactgtgcatgcaggcagcccacctgaagggaagaatcatgggaaaaagagtgcaagataccaaaagtgaaccatcctataaagtcctaggattaaggttaaatgccacacttgaccttcacagtgcctgcttgggtctcttctaagtgtaccttccttcctttcctgatctaaagctttttaataagcttccactcctgctctgaaactcggtctctttttctgccttatgctcctcagtcaagttgtttcttctgaggaggcaagaattgaggtggctgcagatctgtacagattcactgctggtaacttggatgccttctgcccctaacataaagaagtggagatctactaattacctgaaagagaatttaacattcaaaataaccgtcataaagatccacaatgagctgaaatagaacacagaaagacaattaaatgaaatcaggaaactgatgcatgaaaaaataagaatatcaacaaagagataaaaactattataacaaccaaacaaattctggagctaaaaaatcaataaccaaagttgaaaattcacatacagttcaaaaaagcagacttcattggacagaaaaatcagtttaatgcatataaagtaagtgtgtgtgtaatgatgtcttgacatctttaaaaaccttcctctctggggaaaggctgctcctcctgggttcagccaattcttagaaatagcaagggctcagccaggagagtggctttgatatacaaactaataaatctaaagccctaactttcctttctagcccatatgccccaggaggtatgctttaatcatccacaaccaggtaccgagyaactagggacaaacccatagcttagataacaccaaaattactcaaatagtcaaacttaaaatacttattctgccctcccttttgtttctcatgtaaactccaataaagactctagccaaaccttcccctcattcccctcattcctgtttcctgtctcctgcctcctgaccaaacagatgaccttgtgtggcacactgtgtctcctctcctagcagctgtcagtataataagccttgtcttcctgagtctctccagtcagctatacctgactgaccatcaaagacagaacaatcagtgaacttgaaaataagtaatttaaaattattgaagagaagaaattcactgaaaataagtaatttaaaattattgaatagaagaaaaaaagaggaagaataaaagtgaagacagcctgtgggacttacaggactccattaggaggaataaatatgcactatgaagtttcagaaagagacaacagaaagagaaagggagcgaatatgaagaaataatagctaaaaatgttaaaaatctgagaaaagaagtatgcatacaaattcaagagactaaatgaactccaactaggataaactgaaagagacctacactgaaacacattacgatcacactctcaaaagttacagaaaaggagaatcttttcttaaattttttatttttcatttttgtgggtgcatagaaagtatatatatttatatatttttatatatatttatggggtacatgagatgttttgtttcaggcatgcaatgcataataatcacatcatggaaaatagggtatccatcccctctagcatttattctttgtgttatacacaatccaattatactatttgggctatttttaaatgtccaattaaattattattgactatagtcatcctgttttgctatcaaatagtaggtcttattcactctttcttttcttttttttttttggacccattaaccatccccttcttcctcctaccacctactaatcttaccagcctctggtaacccatcattctactttttatcttcatgagttccattgttttgatttttagatcctacaaataagcaagaagatgtgatgtttgtatttctatgcctggcttacttcacttaatataatgacctccagttctatccatgttgttgcaaatgacaggatctcattatttttgatggcagaatagtagtctgttgtgtacaagaaccacacagaaaaaaagaatcttgaaagcagcaaaagaaagcaattcatcagatacaagggagcctctatcagattatcagatttctcagcagaaacctcacaggccagaaggaagtagaataatatattcaaagaactaaaagaaaaaaaaaactgccaaccaagaatactatatctaacaaactctcctttaagaactggagaaattaagactttcccataaaaacaaaagctgagagcccatcaccattagactttccctaaaggcaatattaaaggcagtccttcaagttaaaatgaaacaatgctatccagtaacatggaactatgcaaaaatataaagcttctagtaaaagtaaacatataggcaaatatggaatcctatagtattgtatgttcatatgaaaatcacttttatcaaaatcacttgacatctcaggtcattgcaaaataagtcagtcacctgaccagagtgataactcaagtatttcaaaaaaaaatcaaaaaccttcattatttaagagaggaatgttaattttccaaacaataagccctaataaaaacagcatgaaaccgattaaatttgttttttaaaatgtataaacaatctttaagattttaatcttgactataagatataacttccacaagacttttataatctttattaaggagtcagttaatgcttcaagaaaaccttgctaatctgacataggggcctatatgctgctcttgcatccatgtgtctttgacattaataattaattaatagagaaactgaaggtattttatcc

SEQ ID NO: 95327 - DNA, 43703 bp, Homo sapiens
  misc_feature (1)...(43703): n = A,T,C or G
ggaaggtgacgtcactcagtcctgtgggtttgccatggagagacgtctttgcagctatgtgtttcattacatcatgtgctgtattacttctctcgaaatatccagaggtcagtaatgctgtgcccacagcccccttacgccttacctggggtcaaacctaagtcacagatgtttcccagagaacctcacgctcttgtgcgtggagaaggggatgaaggcgctcacagtgtcattgtaacggcagaatactggaaaagccagtgaccatccacaggagaacggactaaaaaatcagaatattggtgcgatggagcacggctttggagccacgcaaaggaacgcacattcacacacgtcagcccgcatacgtttcagacattatgctgagtgggaaaaaaacaagttgcagaaaactatgtgtaatttgatagcagttaatgttttaaaatgtaagacaagcttatgagctgttcgtgaatatatatatacatgcagctaatgggcaggtaacgagattaaaatgctgcccttctatgtgacaaaacaggagtttataattgtaatatttaaaatgttttgttcttaaataaatctgctttctatatttggacattagcgttgttgtagcacttaacatttatacagaacgctattacttttaacaattttattgtacttgttcctaatcaaattaatgaacattaattgaagatcgctaggccactagaatatatgagagttaagctctgtattttaaacctggtgggttttttttttctctcatatattaggaacatcacaaaagatcaattccaagggacacctggaacctcctgctggactttggaaacatgattgcggatgatatgtctaactacgatgaagaaggtaccggaagttgtgcttcagatgattgaccgaaatgcttacacctgagaacgttaacttctcctgcctctagagtggtgaccccgtcactgagatgggcgtggtcataatactacccccttccttattattttctgtaaatcatacaaaagaaaaatagggttttatatttagtgtaaatcaagaagacagtcctctaagccaaagcatttcagaattggatgtgaagagttagagacccccatggtggagccatggagttaggtattgggaaaccaccactcccagattctcagtcccgcatgatgccttaggtcagttccacactgcactcttcaggctgactcggagattccagctcctgtcttcttgcataaatatatctccacatacttgtctccccccgtgtttaggactctgcgttggagggcctttggagcctgctgtgtgctgggcacgctgccaccttagagagggatggtctctgggtggaaggcctcccctctaggctcccacccactttgcttcctccctgccccctcggcgggcagtgatctgttctgggccctggcgccgtgcctttaacgggtggtttacgtgtctgtctgcctgttttagcttctgcttctctttgtgtcctccacactttgcaccgtccctagatcaggggcacccagtaaatgcttgtcaaatgaaagaagggatcactgaatctcattgacagaagcgcggcttccaggattgaggcagcagtgcaggagctcagagggcactcagggctgccggggtggggaagggagcaatggggtggtcccacttgggaagagccgcaggagggagcaccccctgctggcaagaataccaatgacctgaggaacatgcctcctgctccgcgggggtccatttagctcccttcctgagcagctggtgtgactgcctggggcactcaccgagcatccggggccactgtgagcccacagccccctagacatgccagcacacacacaccagggctcccgacctggccgtgctagggcgaaagaactgggtaacttgggctggttcattctgtgaaacacaaatggtgtggacctcaagtcatttgggttcttgaagtgtaaatgttggattgatgtgtgactcagtgctttggagataaaaacggtgctctaacgggttttctgtttgcttgctttcctttaggagcttggcccgttcttatagatgattttgtagaatatgcacggccagtagtcacaggtggaaaacgcagccttttctaggcagcaagttaagcaggagtaagattatgaaatgatttgtatcctgcaaggagattgcagtcagttcctgggtgcattgtcgctgattccagaagtcattcttgaccagccatgaaaccagaggcgccatcccattctgccggaggacagccagcggctgctttgtggacaccgcaggaagttcctcgggacacggctgctttgggatgtttggagatttgtcatcatagcttttgcgttaggaaatttctgcatgattttttaatatttacaaaatactaaggtagagccatagcgccgcctgtgggaccgcagagcatgctgcgtagctcgcgcgtcaggcgaaccagcgtccggcagcgtcccgccgaatgacgttgcggtggcactggcaacacggcatgtgtcctctgcagggcgctgcgtttttatacacgtcaaagctgttaagaatgtgccctaagggagaggatcttgtcgtagagtctaatgttttttaaaattggtgccagcaattcacgatttatattttttgaattaccaaatatctagatttaccagctctatttttgttttcattttctctagacattcatctgaaaatcattttatggttctcaatccccatgtagctttgcatagcaacggcacacgtggcacgattccagcagagtttatctcacaccgtttatatatcactgggcctctcttacttaaatattatttgacctgcctgagaagcttcataaagtatgtttttttaaaatatattttaattacatttaaaaagacatttttccatgaaaaacatttattttatgagtgatgaattatagattttaaaatcaaggccgggcgtggtggctcacacctgtaatcccagcattttgggaggccgaggcaggtggatcacctgaggtcaggagtttgagaccagcctggccaacatggtgaaaccctgtctctactaaaaatacaaaaattagccgggcatggtggcacatgcctgtaatcccagctactcaggaggctgaggcaggagattcgcttgaactcaggagacggaggttacagtgagtcgagatcgcgccactgcactccagcctggacgacagagtgagattctgtctcaaaataaatacatacatacatacaataaaaccgaatgagctggttctttccatcctcttgtggtacccgtagtgcccagcatccagacctttgtgcccctgtgcacatttggaagctaaaatgtacatcgttgtctgaaaaaacccaaccccaaaaccttcatctgattggtgagctgaagtctgtccttgcaccatgttatcatctgtttctcgtgtccgcctggttgaggaggacccacgagtgctgccgaggtgtggagggctggtattgagttgtggacatcactgttgaccctacctcacgtgccgagactctcatgtcacaggcgtgccttgctgcccccctgcagcactgtgcaggacgtggaccagctggagctgctgcccagcacagaggagagtcgccgcagatgacctagctgcggtgtgagagagcatggcccagacaagcagctgggttggcttctgagaacaggacttaccctgggcttcaggaacatctgatggctgaggttagtgtgcttggaggctgcaggacgaactgtcgatgtttcttagcagagatggtcacagagggcagcagggacaggactggaagggacctgcagcctgcagaccccgcctggcccccgctggcttctggctggtccagtgatgggcaagtgacagaccttccccaggctctgcttccagaactctaatgggaaactgggcctgtctacctttagaagtcttcgattctcagagagcatttgtctaatacaataaaaactggcattaatacaaacctcaaaaacgtgagcgtatcttccaggcttcatggattcttgacatgtaattgttttgttcagaaaagtttatagaattcacataattctgtataaactatggagatccacagtacttttttgtttttgagatttaaagttctaagggattgtcaatagatatcaaaatattaatcattggacaaaggcttttccaaaaattgtgggtttttttcttctgttgtatccatttgagtcctgcatgctgtgaaatgctgagaacagaagcattaaattggtttttctcgggcgtggtttcctttcgattctcctcagctgcagggatgtctgcctataggtgtcagcatccacgtcattgtcccaggatgagagaacagcccccagctagcaaccagcgggcaagcccctgcycccgtgtgtggcccgccagccctggccaggtaaccaggtcctcaggtaccttctgtcattgcgttgcctctcagcggtgcaccgtgcacctgatggggtggctcatgtgaggaatgagagatctcacaataggcaggatttacgggagtgtgtcggggcaggaggtcatgtgtgccagcacaaactgctggaaaccgtcccttatcggaggcaaacggccaagcacgggggtctgaggatcatgtgctacctgccgattcacggtgcacctgccagcgttccggaatcaacaacgccagctcctctcagtgacattgtacatgtcattgtgttattttcgcttgaagtttatatccattttagacctcaggcttcttggggccaagaataaactttcttctgatccttgttgctgtgtccacagtttcaggtacaaagtaggggctctgcaaatatttgttggataaacgagctaaccttatcccgtcctgtttgctgagggagccagctagtgctcttggcaaaggtttccgccgcctgcgaactgaagcgctcagcgagcgggctgtgttaatcccctcagcagcacacgcttcggccccacagtgcagttgtgcctaaaacaggtgagagtttgaacgaagggccgcccctcctgtctgtcttgtttggatagggaccctgcgtgcatgctgttttttgttttggagttttgtttgtttgtttgtttgtttctgagacagagttttgctcttgttgcccaggctggagtgcaatggcgtgatctcggctcactgcaacctctgcctcctaggttcaagtgatcctcctatctcagcctcccaagtagctgggattacaggtgcccaccaccatgcccggctaatttttgtatttttagtagagacggggtttcatcatattggtcaggctggcctcaaaatcctgagctcaggggatccgcccgcctcggcctcccaaagtgctgggattacagccatgagccaccgcgcccggcctgcatgctggttttgaagtttgtttctgaatctcaggatcatgctagctggcatgactgtgctgatggctgcctccaccagcagacagtggagggtgaggtgaactcactgcttgagatcctccgttttaacaagtgctgatataacgccaggcggttaaatgcttcctactgtctcgctgtacactacgagagtttttatcagacgcatttcttcagtccaggtgtaactctttgcttcccctgggtctgatggaaaccaggccccgaggaaggagacgggagagacacagccctgctgggctcccggcctctgcggagaactgtcctggggtggggtcgggagatggactgttttcctaatttatttcaaaccaggaaccctggctgtgtgcattctgcctcaccccccgtctccatattttttaatattcttttcatgagctagcagggatgatgtaaatacactgagctgaccgagggccggatgggaggttctagtgaagcctgcggtttgctgacgactttccccctcagtgcagtccaattatttgggagccgttaaacaccgcatgctgagaagacaccgtcattgttcacacaggagctagatagactttgttccctctacactgcattttttaaaagttttctatcaaaaacacatttcataatcgaaaagttttctaaatgataaaaccgcatgtcacagattaatctcaacattatgttgagtgaaggaagccagacaccgaaggccacacattgtatttgaaatgtccaggaaaggcagaactgtagagacagcagatgggttgttgcccgaggggtgagggcacgccccgcagcgggcggcagtgacaggcacgcctgcacacatctgctcccgcatcaccccacgccacacacggggaagtgtgcgcactccttccagggacagcgagaggagcccctgctctgtcaacgctctgaatgtgctgcggctgccggcagaagctagcaggctcctctgctgaggagctggtgcctgtccagacgcagaagaaaactgacacctcccacgtgggggacagaaaggtcctctcattggtgccacctgcagagatagacaaggagcgcctggccatcagaggacgctcctgacagtgacacagtgaccactataaaagtcaggcgggctgaggaggagacaaagkccaggacgctccgcagctgttggggaagaggagctgcctcctgggatggagaaatttaaggctgcgatgttgctggggagcgtcggcgatgctcttggctacagaaatgtctgcaaggagaacagcactgtaggcatgaagatccaggaggagctgcaacgttccsggggcctggaccacctcgtactctcrccaggagaatggcccgtgagtgacaacaccatcatgcacatcgcaaccgccgaggccctcaccacaggtaggctgggcccaccgcgctccggtgtgcgggctggagggaacactggctgctcgagttctcccagtaagcctccgagagctttgaaggcagtgcggtccttcagcggatggtgttacctgataccgctgctaaaagtggcaatttaatctgagtgtccctcaaatttgatatgcggcagatcacgtttctcctgtggtttctctgagggtgacagtattactttactttgcagttattaagattcagtttttaaacgtgacttttcacttgtatttgtaaagcgttaactaggcctagcaccttctgtttctaatagagttaaagccagtgaagcctctctcggcygtgctggtgggagtagggtgagggctcacttctcgctgcagagattaagccttcttgttctgaattcattacaaagggatgtaaaataagccagtttgaaatgtgaacccattaatactgtttggggattagttctaaattccaatgaattaaagttagaatatcatctcccaaaatggttcagcttggagagttgcccatacacaaatgtrttctragaaaatgacataaacttgattggacgagattggagacaaagcttcttaaaatacctttaagtagcaaattgattttaggatcaagcttttgcatgaatttcagggaaatggcaggtgcacagacatgcagtccagctttcctacgaggcatttgctcttcaaaaccccgtgggtgctgtttatcatggcagaattaaaatctgagggctgcagctaagtcaatgaaatctcacttatgcgttcactccaccattctgttcatctgccatggacgygcccagtttagttctgtgctcacagcagaggaatgccatcgagcctgtggccggtccctaaataacgggagagctgaagcgccggcgataagataaggctcccggcttgctggagacggggaggcgtccgactgttcacagccttggcgtccaggagctcctgcttctggttttccaggcggccactcgtgtgcccttaggaccagcaaccccatgcttgtgccccgcagcccagaacaggtgcaccccacacacagacacctgtgggacacagctccggcttgttttcaccgtagacggctggagctcactcttgagtttggcttcctctgggcgtctgatgccgtgtgtgcgctcataccagctctgcatgtcccatttctggtagcacttggtgggcgttttgtaaatggcagcgtccatggctgtgggtctggtcctgccaggcccgcagggagggcagcggcacaggacactccaaaagtgcaccgacggagatcggcccaacaggacacgaaattcacacagttaaaagggttacggacgtttagggcactgttttttgtttgttttttgagacggagtctttctccatcgcccaggctggagtgcagtggcgtgatctcagctcactgcaacctccacctcccaggttcaagtgattctcctgcctcagcctcctgagtagctggggctacaggtgcccrccaccacgcccggctgatttttgtatttttagtagagacggggtttcaccacgttgtccaggctggtctcgaactcctgacctcaagtgatccacccacctcagcttcccaaagtgctgggatgacaggcgtgagccaccatggggcgctattcttaaggaggaagtaagtttgctctaagctctcagggtcctcagctgtggactggaagggagggttcactgtgctgctgcagcgtctagtttgtgggtcatgagaaaatacgcatccaagatcacccctggaattgcttactgtgggcggcaagccacccaggcactgaggcaagagacagaggacacgagctgttccagtataataaaacaagaatagttataccagatatagatcttagatatgattatatatgaatatcattaatcattagtttgtagcaattactttttattccaatattatgataatcctcgctctataatcatagcctaggaaaaaccaggccatacagagataggagctgaggggacatagtgaggtgtgaccagaagacaagagtgcgagccttctgttatgcccggacagggccaccagatggctccttggtctagctgtgacgccagcgtctgggaagacgcccgttaccaggcggatcgtggtccagcagtagcaaaaggtggcaaggaacaacacctgctacttagcagaccaggaagggggggggggtctccctttccccaggggagtttagagaagactgctcttccacctcttgtggagggcctgacatgagtcaggctcgcccgcagttatccggaggcctaaccgtctccctgtgatgctgtgcttcagtggtcacactcctagtctgccttcatgttccatcctgtacacctggctctgccttctagatagcagtagtaaattagtgaaaaattagtactatcagtactaatagtccctgatatgcagaaataatggcataagctgtctttctctctgtctcctctccctctctgcctcggctgccaggcagggaagggccccctgtccagtggacacgtgacccacatgaccttacctaccattggaggtgactcgcattctttaccctgccccttctgccttgtatccaataaataacagtgcagccagacattcggggccactaccggtctccgtgcattggtagtagtggtcccccgggcccagctgccttttctcttatctcttgtcttgtgtctttatttctacactctctcgtcactgcacacagggagagacccaccgaccctgtggggctggtccctacagcttacccctctagaaaccaaagcaagcagatttttttcaactcactaaaaatcaaagtcgaaatttcacttaagtttatctttgttctttaaataacaaattgtagcctatggaagggggtctttaagctgtgttaacaatggtgagggctgggcacagtggctcacgtctgcaatcccagcattgtgggaggccacggtgggcagattgcctgagcccaggagttctagatcagcctaggaaacatagcaagactccatctctacaaaacgacaatggtgagtgctgactccacagcacttctgtaccaggcattgttccagctgcttcacgcatgttatcctccacacatgctcctcacatcaccgtggaggctgattttatcacaatcttacaggagaaaaaattgacatacagagaggttcaggcgcttgcccagtgccacacagcccagcgagtggcagagcttggacgggaaccagagaatctggcccctgtgctcgtaagcatcctccctgactgctgagatcacggtggcctgcaggtatcctaacaattgcagtgtgcaggggctcttcagcatgctttccaaagacaggcagacttttacaaatggaactacgtttggcagctttaagtaagctgcactgaaaagtccttcaccccacgagccacggggctgtgtggtctggcaaaccctggctctgctgctagagtgagcacaggtctgagggtcggggcagcctgtgtggctccctccttccgggtgagcctctctgaaccgggctgcctccttccgggtgtgtctctctgaacggggctccctccttccgggtgagcctctgaacagggctgtctccttctgggtgagcctctctgaaccgggctgcctccttccgggtgtgtctctctgaacggggctcactccttccaggtgtgtctctctgaacagggctgcctccttccgggtgagcctctctgaacagggtccctccttccgggtgtgtctctctgaacagggctccctccttccgggtgagcctctctgaccggggctcactccttccgggtgtgtctctctgaacagggtccctccttcccggtgagcctctctgactggggctgcctccttccgggtgagcctctctgastggggctgcctccttccgggtgagcctctctgactggggctgcctccttccgggtgagcctctctgaacagggcacgagagcagactctgaaccaggaagtagccgtgtctagcgctctacaagacacataggagaggtggcatccatggccctgaaacgacaagcccatgttgccagcgcattatcaccaagtcacttggcaagcgtttagcaggtgtgtgtgtgtgccaggcctggggaggggcggcctcgcacagagagctcggccattgctcgggtatgcagctggccattcccagctccctacccccactccctgggaaaactggggaagtggcttccctcccagggccttcctccctcacaaggtcacagaggattaaacggagcaaccagcaaagtgtgaggaagcacttaggccagtgtgggaagttggtgcaggcccgtgtggcygaaggcacatctgacatgtctctgccctgaggctcactcagccaacttcagggcccagcaggatggcgggaggtgtcacctggccacagcctccagggcacagggccagcaccttctcagcctctcccggggccctgataactgggagtggcacttcagctcatggcagaaaacgtttggaaacagttgacattttgctacaagatcactggatgttagtattttgccttttctttattgagacatgggttgggagactcaggcaccattttttttttttttttttttttttttgggacatagtctcactcttttgcccgggctggagtacagtggcgcgatctcggctcactgcaacctccacctcctgagttcaagcgattctcctgcctcagcctcctgagaggctgggctaactttgtatttttagtagagacgggggtttcactatgttgcccaggctggtctcgaactcctgaccttatgatctgcccatcccagcctcccaaagtgctgggattacaggtgtgagccactgcacccggcccctcaggcagctttagaaactgatttgtctttcaggagaccagacagggaagacaggagacaggagtggagtgtcccaaaggaaagagacccggggagaagcccaagggtagcagctttgaaaatctgtttctcgcttaaattctaacctgaaaagacaatgctgtttgtgccattttgttttatggcttctgtttgctttgaaaaggctaaatttcagttgaatacagacatttcatgtctaattccagaataaaatgaatccttttaggggactcaggaagggctaggcttgttaacccaggactgagttgagaaaggctgtttgtggatccactgtgccggtgactgtgaggggcacacactgggtttagacacagcctggacaaagccacgcagctgtacccccatccaggggtttcgggtgcaggcgaaggtgaccttaattcctgcaggaatgcagccctcacacctctcctatgagactgcaggactcgtgtctcccaaaccacagtcttgccacattctctctcctccctgactcagaactggggtgatgaacatggcgtcatgtaaaacaatactgtgcatgcacacaacaccatgtgtgcagacaacatgtgtgtagacaccatacacatacaatgtgcatgtagacaccatgcacacaaaacaccgtgagtgtagacaccatgcacacacaacaccatgagtgtagacaccatgcacacacaacaccgtgcatgtagacaccatacacacacaccaccatgagtgtagacaccatgcacacacaacaccgtgcatgtagacgccatgcacacacaacaccttgcatgtagacgccatacacacacaacaccgtgagtgtagacgccatgcacacacaacaccgtgcgtgtagacgccatgcacacacaacaccgtgcgtgtagacgccatgcacacacaacaccgtgcgtgtagacgccatgcacacacaacaccgtgcgtgtagacgccatgcacacacaacaccgtgcgtgtagacgccatgcacacacaacaccgtgagtgtagacgccatgcacatacaacttgcatgtagacaccatgcacacacaacaccgtgactgtagacaccatgcacacacaccatgcatgtagacaccatgcacacacaacaccgtgcatgtagacaccatacacacacaacaccgtgcatgtagacaccatgcacacacaacaccgtgcatgtagacaccatgcacacacaacaccgtgagtgtagacaccatgcacatacaacttgcatgtagacaccatgcacacacaacaccgtgactgtagacaccatgcacacacaccgtgcatgtagacaccatgcacacacaacaccgtgcatgtagacaacactgtgcgtgtagacaatactgtgcatatagacaaagccatgcctgtatgacaacacggtgcatgtaaacaccctgtgtttacacagcgcaatgctatgcatttatgacaatatcatacatgcaggacagacaataccatgtgtgtagacaacaccatgcacatacaacactgcgcatgtagacaccaggtgtgttggcaacactgtgcatgtggataacactgtgcacataagacaacactgtgcatgtagacaacaccgtgagagtagacaatgctgtgagtatagacaacgccgtgcccatatgacaacaccgtgcatgtagacaacactgtgcacaggccagccggccacgcctcccaggactgcccctctcttcagaggcctctgctgggccgggtcagggaactggtggtaggaggacacaacatacagtccttgtcctgagcacttctccgggggtttgcagccacgggagccctctctctctggggggttcacagccacggggccctgagtgctctctctgggaggttcacagccactgggccctgtgcactctctctggggggtttgcagctgcagggccctgagcgctctctagggggttcacagccaaggggccctgcttgttttctctggagggtttgcagctgcgggccctgcgtgctctctgggggggaggggggagggggggcctgcagctgtggggccctgcgtactctctctgtggtaggaggtgaggaggtttgcagccgccgggccctgcacgctctctctgtggggtttgcagccgctgggccccaagcactctctctggggggtgtgcagcctcaggatcctgtgcactctctccaggggtttgcagccatggtccctacacgtgcgtgctctctccaggggtttgcagccatggtccctacacgcgcgtgctctctccaggggtttgcagccatgggggccctgtatgctctcgccaggggtttgcagctacagaggtttcatgtcctggaggaggagtgactttgccaagtgcccttcctaatctcaccaacccatccatgctaggacatctggctctgatgcggctgaaaaaggccccagccaccagcaggaaggtcttttgcttccaagtgccatttctgccccatggagggtgggccaagcctccatcttcgcctccctctccccattcattcccacccctcccctccccaaaggtggggaattcatcaccaaggaaaagggagcagtggcgtctcccggggctgacccgcaagcccagagtgcagttttagtacaaaatgaaaacaagttgctgggtgttaaagtggccgttgggaggggcgccctcgccggccccacctggtgggcatccgcctgccacagcctgtcctggcatggccaggcaccagggctctgattttagaggctgtgtggactccatccacacactgcgggttacttaatcacagaaatgctcgggctttgcaggcaaacacctttgtcagctctggctttggccaagacacataacctcactgagccttatcagggaatatggcaaataagaactagcccttgctgtgggaggacgtctgggcctcccgcgtgctgggcatagggctggtgtctgctgtgtccagctccttcaccctcgtgccccagggtctttcagggcctcgagcccacccttgtttccggaacactgcttgtggggctggggatgctgcttggtggcagctgtccctgcagcacctgggtttctggcaagagaagaaggagctggagctgggcacactggcctccaccatcggcgtcacaagcccatagagtaggccagtttcggttctgtttgtggccacatagatggaaccattagaaaaggggcacggtggggctgggtgcagtggctcacgcctgtmatcccagcactttgggaggcyraggtgggcagatcacaaggtcaggagatsgagaccatcctggccgacakggtgaaaccccgtctctactaaaaatacaaaaaaattagccgggcgtggtggtgggcacctgtagtcccagctactcaggaggctgaggcaggagaacggagtgaacccgggaggcagagtttgcagtgtctgccctccctttcttccccagactatggygcctgaccccgygggagggaggccacagttcacaccacagctggctctgatgtctgccctccctttcttccgcagactactggtgcctggatgatctgtaccgggagatggtgagatgctatgtggaaatcgttgagaagcttccagaacgccggccagacccagctaccattgaaggctgtgctcagctaaagcccaataactaccttctcgcctggcacacaccgttcaatgaaaaaggtcagggaaatcctctcctctccccctaaagccaccstgctggggaccctgcggtcctaaccatctgccttccactaacccccarcatctccaggtggcttcagtgaggccggatctgcctagagtccctttgtcgggtgggggcccctcctggtcagcccggccagtgyggscgtctgtttaaggaatatgggcaggggccsctcctggtcagcccggcaagcgcgggcatctgtttaaggaatatgggcaggggcccctcctggtcagcctggccagtgcgggcgtctgtttaaggaatacgggcaggggcccctcctggtcagcccagccagcacgagcgtctgttcaaggaacacaggcggggcccctcctttgtcagctctatatattataaatattttctcccattgtatgccttgcctttttgttttcttaatggtatctattgaaaagcacgctttaaatttttttttttttttgagatggagtcttgctctgccatctaggctggagtgcagtggtgcgatcttgggtcactgcaacctccgcctcccgggttcaggaaattctccggtctcagcctccagagtagctgggactacagatgcccaccaccatgccctgctaattttgtgttttagtaaggatggggtttcaccatgttgctcaggctggtctcgaactcctgacctcaggtgatctacctgccttggcctcccaaagtggtgggattacaggcgtgagccaccatgcccagcgaagctttaaattttttttaatcatttatttatttatttattttgtagacagggtctcactccatcacccaggctggagtgcagtggtgcagtcatggctcactgcagccttgacctcccagactcaagcaatcctcccaccttagcctcctgagtggctgggatcacaggtccattccactacacccagttaatgttttggttgttttttttttttctgtagagaaggggtttcaccatgttgcccaggctggtcttgaactcctgagctcaagcgatctgcccacctcagtctccaagtgctgagattacaggcaggagccaccacacccagccaagacttaaatcctaaaagcaaaacccagaaagatcaaactattttcaagtaaattaactgtatcccaagacaaaggtcaagaatagttataggaatataaaaatatccaggactcaacagcatatgaggcatgcaaagaatcaggagaatccagttcctgacaaggaaaatcaataagtccaaactgacaaggcccaacacaggtgtcagaattctcagacaaggacataaaatgccagatactccatgtgttcaaaaaattaagtagagacgtgaaaggcatttttgaaaagatccaaatcacatttctagaaataaaaactataatgtctcattttagaatacattggctgagaccaatagcagattagacatttccaagaaaaggttaacaaacttgcaggcaagcagcagaaactatccacggtgagacacacaaagagaaagaatccaagatgaagggaggaccagcgacccgcgggcggcctcaggcagcctgacgcatgtgtctgcgtcctcagcacagaggagaacaaaagcaacataaatacttggagaaataattgtcaaaattgttccaaatttgatgaaaactataaactcacagatacaagaaaatcaattccaagcacaagaaacatgaagaaaatgacagcaaggcacacagtagttagattgctctgaagtaatactcaagaagaatcttgaaggccagagaagaaagacacacatcacacacagagaagcaacagtaacaatgacagcagatgccttgtcagagcgatgtgagtgagaagacagtggagccacatcattaagctactgaaaaaaatacaacacttcaacctagcattctttctggggatagtgcagagccttgctctgtcacccaggctggagcacagtggcacagatacgggtgccacttactgcagcctcagcctcctgggctcaagcaatccacctgcctcagcctcccacatagatgggacaacagatgcgtgccaacacgcttgcctgtttttcttattttttgtagagagaggatctcactttgttgccctgactggtcttgaactcctgggcctcaacaacccttctgccttagcctcccaaaatgctgagattacggtgtgagccaccatgcctggcctgttagaattctacaccctgaaaaaaatatctttcagaaatgaaggcaaaatagcctttctcagacaaacaaaagctgaaagaattcatcacccacagagtcatgtaacaagaaatgctaatggaagtcactcagacagaaggaaaaccgcactggatgcaaacagagacccgcgccacaggacacagcgtgatagagacgcggacgccgcgtggcgggacacaacgtgacagagacacggaccagcacggtggagtaaagcgtgatagagacacagactcacacacagggtggggacagagtgtgatagtgacacggacccacgcggcgggacacaacgtgacagagacacggacccgtgtggtggagtaaagcgtgatagagacacagacccacacggcggggcggagcatgatagagacacggacccaagtggcgggacatggcatgatagagacatggacccacgcagcgggatagagtgttacagaaatggtaactgtatggggaaatgtgtaagattttaaaacatgttatttaaatatctttaaaagataattgacttaaaaataataatgaacggtatggtttataaaatataagtagaatgtacaacaacaatagcacgaaggctagcaggggagagatggaagccgatgacggtgaggttcccacaccgtgtatgccacagtgtcatcccacagctgtaacgagctgcagacggacaccatgaacccaaaagccaccgctgaaatcacagaagagttagcaatagtaagccccagcaaaagagttaaaattgaatcccttgagaaacattcaacccaaaaaaggcagaaaagggggaaggagggacaaatactagacagtacaggtagaaaacaaacaagataataataatgacgccaaatgcgaatggtgtgaagacccccaataacagtcagaagttgtcacattagataaagaagcaggtcccagcccccaactatgtgctgcttataagaaacaactttttaattttgagatggagtcttgctctgtcgcccagattggagtgcagtggcgcaattttggctcactgcaacctctacttcccgggttcagctgattctcctgcctccacctcccaagtagctgggactacgggcgcccaccaccacacctggctaatttttgaatttttagtagtgacaaggttttgccatgttggccaggctggcctcaaactcctggcctcaagtgatccgcccaccttggcctcccaaaatgctgggattacaggcataagccactgtgcctagccaaggaatacactaaaaacaagsaaacaaacaaacaaccaaaaatctcctgttgcacttcagtaacactttaaatataaagacgtaaatagattaaagcttctaaaaaagaaaaatagaccaggtgcagtggctcacacctgtgatcccagaactttgggaggccaaggcgggtggatcatctgaggtcaggagttcgagaccagcctggccaacatagtgaaaccctgtctctactaaaaatacaaaaattgctgggtgtggtggtatgcccctgtaatcccagctacttgggaggctgaggcaggagaattgcttgaacccaggaggcggaggttgcagtgagctgagatcgtgccactgcactccagcctaggccacagagtgagactccatctcaaaaaaaaaaaaaaagatggaaaaatataccacactaacactaatcaaaagaaagctggagttactatattagtaacacatacagtaaaattttggagcaaagaatattcccaagaataaggaaggtaatttcatcctagtaaatggatcagttcatcagggggacataacaaacctagatgtctctgtacctaataacagatcttcagaatatatgaagcaaaaactgacaatgctgcaaagcgaactagagaaacccacagttataggcagtgatttcaacatgaaggtctccagccattggctttcattttcacgttttaaaaccagaaaactcatagcaaactaagccaaaagaaagcagaagaaagaaaatagtgaagatcagcatgaaaatcaatgattgaaaacagaaaaagagtagagcaaattaataaaaccaaaagctggttctttcaggagatcaaaacaattgataatcctctagctagactgatgtggaaaaaagagaaagacaaatcatcactatgaacgagaggagtaaaatcaccagagtctacggaaattaagaggaaaataagggaatattattcacaattttatgccaatacatttaacaacttagattaaaaggacaaatgtttttgaaagacataaactaccgaaggtcactcaagaggagaaaggtcatctaaatagtattacatcttatggaagaaattacaaggccagtcatggtggctcacacctgtaatcccagcactttaggaggccaaggcgggtagatcacctgaggtcaggtgttcgagaccaggctggccaacatggcaaaaccctgtctctactaaaaatacaaaaattagccagacatggtggtgggcacctataatccaagctactcaggaggccgaagcaggagaattgcttgaacccaggaggtggatgttgcagtgagccgagatcacatcactgcactccagcctggcgacagagcaagacgccgtctcaggaaaaaaaaaaaaaaaaaattacaaagaaaactgtaggcccaggctgggcacggtggctcacacccgtgatcccagtactttgggaggccaaggccggcagatcacctgaggtcaggagttcgagaccagcctggccaaaatggtgagccctctcctctactaaaaatacaaaaattagctgggcgtggtggtgcacacctgtagtcccagctattcaggaggctgaggcacaagaatcacttgaacccgggaggcggaggttgcagtgagctgagattgtgccattgcactccagcctgggcaacagagtcagagtgagactccgtctcaaaaaaagaaaaaaaaaaggaaagagaatttcagtccctgatggcttcacagggtatttaccaaatgtttgaggaataaataatataaattgtacataactcttccaaaagattgaagaagaggaatacttcccaaattcatttttctgctctccaggaaactctatttaatgaatgaaaaggcaagtcaaagctgggagaaaatatttgcaaagcagatatctgataaggacttgagtccaaaatgcataaagaactcttccaacttaagaagaagaaagcaagcaaccccatacaaaaatggacaagagggccaggtgtggtggctcacacctataatcccagcacgttggaagactgagccaggaggatcacttggacccaggagttccagcccagcctgagcaacatactgagatgccatctctattataaaaaagaaattttttttttgagatggagtctcgctctgtcacccagtggcacaatctcggctcactgcaacctctacctcctgggttcaagcaattcgcctgcctcagcctccagagtagctgggactacaggtgcgtgccaccatgccacttaatttttgtatttttagtagagacaggggtttcactatgttggccaggctggtctcgaactcctgacctcaggtgatctgcctgccttggcctcccaaagtgctgggattacaggcataagccaccatgcccaaatataaaatttttttaaaagaataaaacatgggcaaaacttctccaaagaagatatatgggtggacaataagcacaaaatcatgctcaccatcttccgtcattagaaaaatgcaaataaaaccacaatgagataccattacataactaacagaatggctaaaatttttaaaaatgtagcaagtgctgtcagggctgtggaagatctactggagggacatcaaatggttctaccactctgactctggaaacccatttggcagtttctttaaaagttaaacattctgccaggcgtggtggctcatgtctgtaatcccagcactttgggaggccaaggcaggctgatcacctgaggtcaggagttcaagaccagcctggccaacaaggtgaaacctcatctctgctaaaaatacaaaaactagccaggcatggtggtgtgtgcctgtaatcccagctactcaggaggctgaggcaggagaactgcttgaacctggcaggcggaggtgcactgagctaagattaggctgctgcactccagcctgggccacagagcaagactccatctcaaacaaacaaaaaagttaaacattcatcaccacgtgatctggaggctctgccccagcattcgcccaagagaagagagcctctgtccacaccaggatctggtgcctcatgctcagagccccagactggacacagcccaaactgcaggtctgcagatagagcagccatggcagatcaatgcaagagggagctattcagccataaaaaggaatcactattgatccccaacaacgtgggcgcttctcagagcagttataaggagtgacaaaagccaggcggaaagcacggcacgttctccgtgattctgtttacacagggcctggaacacgccgagtaacacgcacggtcgcagcagtggggcttgggagaggcaggaggacggattgcagagggcaccggcggcttcagggtcaacagaggcattcactctgcacctgggtgctgggtcccggggtacacctgtgttcaccctgcgcctgggtgctgggtcctggggtacacctatgttcactctacacctgggtgctgggtcatggggtacacctgtgttcaccctgcgcctgggtgctgggtcccggggtacacctatgttcactctatgtgtgggtgccgggtcccggggtacacctgtgttcactctacgtgtgggtgctgggtcccggggtacacctatgttcactctacgtgtgggtgctgggtcccggggtacacctgtgttcactctatgtgtgggtgctgggtcccggggtacacctatgttcactctacgtgtgggtgctgggtcccggggtacacctatgttcaccctgcgcctgggtgccgggtcccggggtacacctgtgttcactctacacctgggtgccgggtcccggggtacacctatgttcactctacacctgggtgctgggtcccggggtacacctgtgttcactctacgtgtgggtgctgggtcacagggtacacctacgttcactctatgcgtgggtgccgggtcctggggtacacctatgttcactctacacctgggtgccgggtcccggggtacacctgtgttcactctacgtgtggatgctgggtcccggggtacacctatgttcaccctgcgcctgggtgccgggtcccggggtacacctgtgttcactctacgtgtggatgctgggtcccggggtacacctatgttcaccctgcgcctgggtgccgggtcccggggtacacctgtgttcactctacgtgtggatgctgggtcccggggtacacctatgttcactctacacctgggtgctgggtcccagggtacacctatgttcactctgtgcctgggtgctgggttccggggtacacctatgttcactctacatgtgggtgctgggtcccggggtacacctgtattcaccctgcacctgggtgccgggtcccggggtacacctatgttcaccctacacctgggtgctgggtcccggggtacacctgtgttcactctacacctgggtgccgggtcccggggtacacctatgttcactctacacctgggtgccgggtcccggggtacacctatgttcactctacacctgggtgccgggtcccggggtacacctatgttcactctacacctgggtgctgggtcacgggctacacctatgttcactctacgcctgggtgctgggtcacagggtacacctatgttcactctatgcgtgggtgccgggtcctggggtacagctatgttcactctacacctgggtgctgggtcccggggtacacctatgttcactctacacctgggtgccgggtcctggggtacacctatgttcactctacacctgggtgctgggtcccggggtacacctatgttcactctacacctgggtgccgggtcccggggtacacctgtgttcactctacacctgggtgccgggtcctggggtacacctatgttcactctacacctgggtgccgggtcccggggtacacctatgttcactctatgcgtgggtgccgggtcccggggtacacctatgttcactctacgcctgggtgccgggtcccggggtacacctatgttcactctacacctgggtgccgggtcccggggtacacctatgttcactctacacctgggtgccgggtcccggggtacacctgtgttcactctacatgtggatgctgggtcccggggtacacctatgttcactctacgtgtgggtgctgggtcacagggtacacctatgttcactctacgcctgggtgctgggtcccagggtacacctatgttcactctacgcctgggtgctgggtcccagggtacacctatgttcatcctgcacctggatgctgggtcacggggtacacctatgttcactctacgtgtggatgctgggtcccggggtacacctatgttcaccctgcgcctgggtgctgggtcccgcggtacaccagtataaaaatcttagggtcgtgcatgtttcattatgcctagtttgttgtatgtagttataactcaatgaagctgtttttacagggaaaacatctcgttgaaagcatgctgcaaatcacgagcatatctccaggccatcaaacgttctgtttttagtgactaacacccgacacttggatgcaaccgaatttgccccatctcctttctgctgcaggcacttgagtggcctgcccatggctcgctcatttaaaccacactctgataacatgttattacacaaatttttctacttttaaaattattcatgaaagctagattgtcaggggtggaattattggagcagaagtctaaactagctcttccttctccacacaggctcagggtttggagcggccaccaaggccatgtgcatcggcctgcggtactggaagcctgagcggctggagaccctcatcgaggtcagcgtggagtgcggccggatgacccacaaccatcccacaggtaagtgtgggcggggggtgggagggaggtcagcgtggagtgcggccggatgacccacagccacctcacaggttaagtgtggggtggggggcgggggcctggagctgccgccatctgcacgtctgcttaaaggagacagaagctgaccctgcacctgccggctgcctgctgtgagggcgccctgcccgggacactgggctggaaatcttgtgggttcacatcgatttttttatttgttgggggagttggcttattttttaatctgctttgcttaaggcctgttttcagcccaaaagcaggattagcgataagcacggtgatgttgaagaaactgtgcaagggaagaattcagtggttttggtatcatttgtgtcagaacaaaagacaaagaaacgcaccagtgcctgggtgcaggtgggatcggggggaccctggggacaagggtttgtacaatayttcctgcattttcctgctgtgccctgggttggccccaccacccgccggccaagggagccaaggagaccacgggaaccacgggagcggctccaccccaygggccacaggtttctaacctgtaacggggcgactgccacatgtgaatcacacccccaaatcgggctgtgtgagggtgaagcgggttggatcatgtcgcccccttaacacggcacttccgtccttgtggtctgtgccagctggccagctgctcactgggatttgtccccgtccgcagcccgtcctgtggagggcaggcctctgagaggccaggctggggtggctgcggtagcgcctgactctrggcctgactttgaaaggtaatgaggaggcggctcggttggcttccatttaaaaaaagcaaaaaggactcaaaactcctgacctgcagttggcccttagtcctggcaccgcccagtcccacgcacatccaacagccacgctagcctcgttcaagattaccttttggtatctgctgtgactggcatcccaacaaggagggcagagctgcccacccctccgtgagaacagcggtgagcaaccggccttcgatcaacacgcagctctgccggcctggccgtcccacccccactgagtctgcagcaaagcaggcgcgtgcctttactaccctggggacagatggcctaagcagtggactcacaggcaactttgctaactcgttaaaatgaaagagggaaggcacgtgacccaactggtgggccagagtcagatgctgagaagggagcagtgctggactcctgctagctgagtgctgcaactgggcgcaaattaaaaattaaaaccttcagacccgaaaatgttgggcatttgccaggtgcaggtgcagcggctcacacctgtgatcccagcactttgggaggcagaggcaggaggatcacttgagcccaggagtacgagaccagcctgggcaacacggggagactccatctctacaaaaaaattaaaaattagccaggcatgacggcacgcacctgtgtttccagctactgatgtaggaggatcgcctgaacccaggatgttggggctgcagtgagctgtgtttgcgccattgcactgcagcctgggcgacagggcgaggccctatctcaaaaacaaaaaaaaagctggacatctgaaaacaatgtaatgagcacaagaatctgtgttaataatttaaatttctaaaacatttgctaatatatttcctactcatattttaaaaattatttcacggccaggcgcggtggctcacgcctgtaatcccagcactttgggggtgccaaggcaggcggatcacctgaggtcaggagttcaagaccagcctggcccccatggtgaaacctcgtctctactaaaaaatacaaaaattagctgggcacggtggtgcatgcctgtaatcccagctactcaggaggctgaggcaggagaatcgcttgaacccgggaggtggaggttgcagtgagctgagatcacaccactgcactccagcctgggcgacagagtcagactccatctcaaaaaaaaaattatttcacatgtttaatagatgaataatttatatattctatgataatgaccaaaaatgttttaagggtttgattttatgaaattgacacttcaaagtgctttttaactctactcccttttccattttcaaaccacctctggcagyaagagccacagtttgtgttacagcctgcatcgcgtgctcccatgagtccagagctgcagccaccctgcgcgggggcagagccgtaggcrgggtcaggaccggcccagagccctgggcttgagaaccattcatagactcttgccgctgctgcagccctcccgccrggccaagggaggccctgatgagtgccttcaagagtggcccaacagccgctggaaagcgtctctgcagcctgtctctgcggcctgtctccgcatggcgtgtcacgggcaaccatgctccatgtagcggccgtgttgagtggccgttcaccgtgggcccagcctgggcttagggtcatcttttccccacgacagccccggcagggcagtgtcacagccccggtgtacagagaagtgggatgtcagaacgcacgcggcacccaccgcagagcctgcctctggccaatggcgccgtgacagcaggctcgcccctctcctaggtggctgtgggcctcagacacacccacagggtccacagcagaaccttctgaagctaacatggctccaaaacagcaacacaacctctcagccccacatgccccatccacaagaggggtgatcaccatgcccttcacaggctctcgtgaggactgagtggcagatgacaccctgggagcagtgcccagtggggcaagggctcggcaacgggggtcactgctcccctgcatggccactcgcactgtaactactgccaccaccacagctgctcccatcggcagcaccacaccatccctactgctgctgtcgctagcaacactgtcaccgccaccactagtgccactgccacccccgccactggtgccactgccacccccgccactagtgccacccccgccttttatcactgctccgcttttgtcaccagtacagccatcaccactatggctgctgctactggtcctgtcaccactgatatcaccagttcctccacatgataccgtcactagtacgacaaccactgctgcagtcactggcaccacactgttcccaccctgaccgtcacgagtaccaccaccattgttgctgctgctactggtactgtcaccacggccgtcactagtcctcccacacgactgcatctctgaaactacatcatgagtaccatggccatcacttcgcctcctgccactactgacccgcagcggctgcagtccccacgatggctagcagtgagaggagagagctcatgtctttggaagaggcagcccctccagggctgtctccacccagacggtgaccacgggatttccaggactgtcctgccagccctgggcattgttagcctcattatggccaggatcatcgtaattcagatcagtctcttccgagctcctctctgayggcttgcacactagcggaatgaggycactgcaatggtggatgggagcctagtggggccagacgtggccatgttccctgagagctgcgcacccagtgccacctgctccgtgaggtgcagggctggctgtgtggactgcggggtgagctcagtaccccagaagccgctggctccatctttccccactgccctggaagatggaccaggacaggcctcccggacttcttccttaaccrtgttttattaaatacatatatactcgcatgcatttatttttcagtaaacagttgtaaaatttgacataccaaagaaaataagggaggcagtgcctataagatgagctctgagcttgtctgtgctgatgagcttgctggctgctaatgcacgcccagaagttaggcaagaaaagccccaagcaccagcagggcgagtgagtcggccccgcacaggaaacgcctgagtgtgcacaacggacccagagctctgcggggtcgctctcaagtcaggagagcccccacctcagccttcttcctgcacaggctcgttaactgataatccccggccacggatgctaaaggtctacgtgacgcggtgttcccaatagccaaaggcggaggcagctcatgcatccacacacagatgacgggcaatcaaaatgcgttcgtccacgcacggaatgcgattcagccgcggagaggaagggaagccgtggcgagccacgcgggtgaacctggggatgcgtcctgagtggaacacgcccgccacaaagggacaaatcgcgtgcggtcccacgaggagcaggcacccagagcagtcacatccggagacagaaaagtcaactgggggcggccagggcctggggagggcggtggggtgagtggagtggggacagagctacagtttgggaagatggggagttccagggaggatggagaatgtccacagtgtgaacgtggttaatgccgccgaactgtgcacctgaacatgggaaagacggaaaacgagcaaacccttcctcgggagtcccacgcagcgtggcgggcggccccaggccctcccaagcggcccaggtgatggtgcccctctctctcttccctgccctccaggcttcctgggctccctgtgcacggccctgtttgtgtcgttcgccgcacaaggaaagcccctggtccagtgggggagagacatgctgcgggcrgtgcctctggcagaagagtactgcaggaagaccatccggcacacggcaggtgagccgctcccccggccccagtccgcactcagagcagatctggacagatccagcccctccatgggcccccaaatacttcaaggcactttcgctcttagatggaactgggagggccctgtccgggccatgtgagcagagctggcctcgcaaggcaggccccatgctgctcctgaccagtctgcctctgccctgacctgggaggctttgcctccccacccggagcctcagagagacctgagcctgccggggacatttgcctccggcgggtccacccgtccccgtccaccccagcccgcggcaccaagcgactggcagccactgggatgtgagtgggacctgtggtgccccctggaaaaactctgcttctgccggtttgggcgagctcagggctgggcccttccctcaggagccccatgaggctggccagaggcagggacagcaggtatgggactaggaaatccgtgacggttccggaagattcttccaccccacggaaggtgccgtctaagaggggagggggcggcagggggagcacaggcagcttcatgcagcctttggcgtccttgcatggttgaggaaattggaaataacgtatccagtgtgtgtgtccttgagaaggagagggaggatttgaatgtaggatcaggtttgcttatttttcaaaacagcctcaggctgaagtcttcttgattttttttttttttttttttgagatggaatctggctcgtcacccaggctggagtgcaatgatgcaatctcagctcactgcaacctctgcctcccaggttcaagcaattctcctgcctcagccgccgaagcagctgggattacaggcgtccgtcaccacgcctagctagttttttgtatttttagtagagacggggtttcaccaggtcgccctgacttcaactgacccgccttggcctcccaagtgctgggattacaggcatgagccacctcgcctggtctgaagtcttctagaaacagaaaaaccagtgaatcgctttatttcccctgcaaggcacaggcacgtgttctgaaacgccttatgggggtctggttcacagctttccacgggggtgcaggcacggatacccgcctggacgcagctcaggggctgctcagccaccaggcctgtgctgatgggagcaagaaagtcagcgtccgcacacagtcagtacctccttgagccactgctctgtgctccccgtgaccgggccgtcctcaggaagcgtgactgctgagcacacctggcaggccacagcacactttgtttccagtggtttcatctctcttaccgtttggtgtgggagcggtgggagatggctaagcggaggttgcagtgtgccaagatggtgccactgcactccagcctggacaacagagactccgtctcaaaaaaaaaaaaagaaaagaaaaaagaggccgggcgtggtggctcacgcctataatcccaacactttgggaggccgaggcaggtggatcacctgaggtcaggagttcgaggtcagcctgactaacatggagatggctaagccggtggtgccgggttctttccagctgaggttgttgtctgcagccaggggctaagtcatctccctaaccccaggagagtcgccctgacccaccttagaaacaggtgagcagtcaggcatggggccacgccattactgaattcacagtatattaacgaatgttctcccagaactttggtattcaaaacggttttcctcaaagcattttctgagaacagttggaattatctaaccagcaaaacctcctcccctttgtgttcatggaatgtttctgactgttcttcagaaagctttattctttctcttagggatttgaaatgcacagatatcagtttaaagctctgagaaacaatcctccaaataaatctgttatttcaaatttgtttaacccagagtttcatgaattcccttgacacagaaacctttttaacagagcatctaaaatcatccagagatcgttaagtcccgtaggacaccctccggaaacactgctctgggcttctgaccagcccacctgacacggccctctgcagtgaggacagttcacaaattagctccctgcttttgtatttagacgtctgtttccgaattggccaaccccggctgactcgggtgagaggcagtgctttcagtctgcgcccaggtccatgttgacgctccacccggagtttcaggccctgtgggttcatgggatgcacctgtgaccgctgccctcttacttttgcgtctttcacttccaatttcatgtcgctgaacaagaccctaagggggctggacttttccttgtgtgaaaccaagttggcccagagtttcggagggcctgagtcgcgggtgcctgygagcctcgtccaggtcmtggtccagggctctcctggcctccctgtggcctggagctctgtggcaggagcgtagcctccccgctgcagccctccagctctgctctccagcgccctgagctctccaaccacggccaggcagacaggatctgtgccctgtcacctcatgtgatcggcacacgtgtcccttgggcctgacagccaccagcggcctgcacggctcccaccctctgtggctcccgcggtgccagggagcaggaggtggggtgtggcgggcaggggtgctcaccgtaaggcaggcaggagggcagtgggcccgggtctgggcagctgcacacctcctggctccacggcggggaaggcgattccctgtggtctgtagggtgtgtagctgcaggttcagactcccttctgagtcagcgtcctcttggccagatgacctcttaagaagtccctagagcattcaggggcttggatttcagttaggagtaatgaaacatgccacgccctgctctgcaggcacagggctaatgcaacaatgtaacgagaatgcttttgccccatctccatcttgcttgctgtcctttcagagcagctaaaggctgggcatggtggctcacacctgtaatcccagcactttgggaagccgaggtgggaggatcacttgaggtcaggaattcgagaccagcccggccaatatggtgaaaccccatctctactaaaaatacaaaaattagccgggcgtggtggtgggtgcctgtagttgcagctactcaggaggctgaggcaggagaatcgcttgaacccaggaagcggaggttgcagtgtgccaagatggtgccactgcactccagcctgggcaacagagagagactccgtctcaaaaaaaaaaaaaggaaagaaaaaagaggccgggcatggtggctcacgcctgtaatcccaacacgttgggaggccgaggcaggtggatcacctgaggtcaggagttcgagatcagcctgactaacatggtgaaacctcgtctctactaaaaatacaaaaattagccgggtgtggtggtgggcagctgtaatcccagctactcgggaggcagaggttgcagtgagccgagatcacgccactgcactccagcctgggggacgagagggagacttcgtctcaagaaaaaaagaaagaaagaaagcagctacaaatgtcagcatgttggtaattctggacagtcgctcagttgtttactccaggacaggtgctcggcttctccacatgcctgcagctgggtagagggggcattgccacttccccgccacacacacgcccccaccctccccacccccaactccctgcacccgccccactccatggatgccattgtgttcagctccccttgttctttatgtttagaataccaggagcactggttttactttgaagctaaatggcaattttatttggaggagaggaaaatcagtaaagactcagaaaataaagccatcttccccgacaattatgatgcagaagagagggaaaaggtaagccttgtcctggcactggggcaatgtctggcacaccagtggtgctcaataagtgcatagcaagtggatggatgggtgggtgggtaggtgaatggatggatggatagatggatggatagatggattttggatgatgggtgggtggaagggtgcgtgaatggatgggtaagtaaatgggtgggtgaatggatgaatagatgggtggatggatgggtggacaggtgaatggatgggtgcatgggtgggtgggtgggtatatggatgggtggttgggtaggtggatggaagggcaggtaggtagaagcgtgggtgaatggatgggtaggtaaatgtgtgggtaaatggatgaatggatgggtggatggatgagtggatgggtgggtnnnnnnnnnnnnnnnnnnnnnnnnnnnnnnnnnnnnnnnnnnnnnnnnnnnnnnnnnnnnnnnnnnnnnnnnnnnnnnnnnnnnnnnnnnnnnnnnnnnnnnnnnnnnnnnnnnnnnnnnnnnnnnnnnnnnnnnnnnnnnnnnnnnnnnnnnnnnnnnnnnnnnnnnnnnnnnnnnnnnnnnnnnnnnnnnnnnnnnnnnnnnnnnnnnnnnnnnnnnnnnnnnnnnnnnnnnnnnnnnnnnnnnnnnnnnnnnnnnnnnnnnnnnnnnnnnnnnnnnnnnnnnnnnnnnnnnnnnnnnnnnnnnnnnnnnnnnnnnnnnnnnnnnnnnnnnnnnnnnnnnnnnnnnnnnnnnnnnnnnnnnnnnnnnnnnnnnnnnnnnnnnnnnnnnnnnnnnnnnnnnnnnnnnnnnnnnnnnnnnnnnnnnnnnnnnnnnnnnnnnnnnnnnnnnnnnnnnnnnnnnnnnnnggtgggtatatgtatggttgggtgggtgggtggtggaacggtgggtgaatggatgggttgataaatgggtgggcgaatggatgggtggatggatgagtggatggtgaatggatgggtgggtggatgggtggatagatgaatggatggtgaatggatgggtgggtggctaaccccatctctactaaaaatacaaaaaattagccacrtgtgctggtgtacgcctgtaatcccaactactcgggaggctgaggcaggagaatcgcttgaacccgggaggtggaggttgcagtgagctgagattgtatcattgcactccaacctgggggacagagccagattcatctcaaaaagaaaagggtggatggatgaaatggcagttcactaggaggggcccagaaagcttgtgctgtaatatacccagaagtggctccacttgggcacacgccccracccacggctctcttgtcagacctacaggaagtggagctcggaaggtcgagggggaagacgaggccacgatgcccccatgatagcctatgacgccctccttgcagcaggaaacagctggactgagckgtgtcaccgggccatgtttcatggaggtgagatgttccttaatggccgtggcttcctggagggtagcacccttcttctgaagcaccccctcggagtgtcctaggactgcaggcattcaggggccacctcctgagctccagcatgtgcgtccatctcttcctttctggaacccactttgggagggcacaggctccagggtatacctgctgacctaagcgtgctcatgtgaggacattacaggatacaggtgcagctgcaggtgcctgctgtgagctccagcagaccaagagtctctcacctggtccacragcctggaggccagtgcagccttagaataggtggggtgtaggggtgtgggggcttctgcccttgccactgctgcctcaggctggccaccttcacagggttccattccaaggtcaccgtcatcttgtcctttgctctgcagcctctgtgcaaagtcgcagactgtggcctggagttaggtcctgggctcgcatcctgctccatccgtgctggctctgtgccgccctggccgtctctggccatggagggagaggaggaagcccagcagagtggctgtggcagctccaggcagctcctacccrtaaggtcaaccctgtgccttgtgggagcagctgttatggttctgtgagactggctgaaattgcctcccttcagtgaggcttggagctgagcttgaccacagacatgagctgggaaaacacaaatgtggccccgtttggtcaggaagcctctgcacagagccggctcagcccctggaggggtttcctccgtgaccccagctcaagggtgggaccatgcggcctcgggctcccctccctctgccttccttctgcaccktcctggcrcctcactgactcttagtgctgaaacaccgcttcacacagatgcctgccccagggagggagaagggaagcgcctgtccccctcctgtttgtttttgggtttgttgttttttttttgagacaggatctcactctgtcactccggctggagtgcagagaggcaatctcggctcrttgccacctctgcctcccgggttcaagagattctcccatctcagccgcctgtgtagctgggatgacaggcgtgagccaccgcgctggcctgcctgtcccttttatcagctgcccccagcagaattggggtttggcccaccttaggggcggccagccccaggggtcttgcagaggccctggtcaggtggagcccactgcaactgctgcctttgcgtttcaggggagagcgcggccacgggcaccattgcaggctgcctgttcgggttgctgtacggcctggacctcgttcccaaaggcttgtaccaggacctggaggacaaggagaagctggaggacctgggcgcggctctctaccgcctgtccacagaggagaagtaaagccatttctgccactttccccctagagagccgattccaccccggggcccgtagggccctctcgcagcccctgggtgagggtgtctctgtgaggctccactgcggtctgtgcctgactggccacatctaactctctgtttccaatttcagaatcctaactgttgcataaaatacattgtttgtcctgcgagaatattttccgtcctccaccatcaacattgacactgcgtagatttgccgcacttggacctccatgcgtggcactcacccgcagtctcctggacaggcgctgtattttattctgtcgcagagctaatgctgtttactcactcacttcaacaacactaactgcggtggtggcctccagcaggcccccccgctgcagaccctctgtcctgcctctgcctccaggcatgcgtttccccgtgagggccaatgcacctmcccccaccccccaccctcccatgtccacagtgggtcgtgtgttcctggacagagaaacagtccacactggggcctgcgggacacatatagcagcatattttgctcttaaccccacccacctttttaatcacactagattttaagatcaatccctttttgaaacaactcacggagaaaaccagaacataaatggcctcctgccagctccggcgtctctctgtggtctgccttagtgggccaagtccaaatgcagagaaggcctttcccttccgcgcctgccccatcgggctcgctgacgaggaagcgctgtccctgtgatgaggttctctctcagagagtcttggaaaagagaccacttgctcttgtttaaaataaatttggacgtgatttttccatgcagcatctggtgtgaataaaacagcagttgactgatgtttaccgctgtgcttggccgcttggctagggcctctctttttgttgtgatttcattaaagggctcgcctctgggcagagttggaatcccagaggaagccccagcctcagggagagaaggcactggggcagaaagcctggttggttggaatctctgtgggcatccaaaatacaagccctacccccacgggcgtcttcttctatgggatgatttgaaaggggaaagtggtgatgtctttatgctcccacttaggattcctgtgtgagtggactggcaagagaggctggtggacttcacaggtgggggccacggactcccagctcccaggtgcattgggtccaggcttcccgggccagccccgccaaccacttccaggcgcctcactccccggccgcctccccttgatggaaatgacccctgcattcattcagtgcaaggagcaggcgtgtcccaggggtagaggtgtcctgggggtaggcatgtcccggggatgggcgtgtcccagggatgggggtgtccccaggggtagaggtgttctgggggtgggcaagtcccgggggtgggcgtgtcccaggggtagaggtgtcccgggagtgggcgtgtcccgggggtgggcgtgtcccgggggtgggcgtgtcccgggagtgggcgtgtcccgggggtagaggtgtcccggggtgggcgtgtcccgggggtagaggtgtcctgggggtgggcgtgtcccgggggtaggggtgtcccaggggtaggcgtgtcctgggggtgggtctgtcctggggatgtgcgtgtcccgggggtgggtctgtcctggggataggcatgtcctgggggtagggatgtcctggggataggcatgtcctgggggtagggatgtcccagggtaggcatgttggcggggggtaggggtgtcccaggggtaggcatgtcccaggggttggcggtcctggggggtgggcgtgtcccagggcgtgtcggggggggtagggttgtcccaggggtgggcatgtcccaggggtagtggtgtcccggggtgagcgggtcccgggggtgggcgggtcctggggctaggtgtgtcccaggggtaggggtgtcccagggatagggacacgctttgctttttccatagagatgccccgttcgttttgtgggaagtgtagtccatgctgatggaggaatccgtggccttctatgctgcagcaatgtggctccgtgctgagcttccgaataactggactaactgtgctgctactggtgctttaagtcagaagaaccagagagacaggcacacgggggcgaagggcctcacgtcacacacgtccatggagtgtggtcccagcacccstgggtgtggggaaattaactgagaattacctttcaggaaaagaaacccaattaaggtaagtcggaactgttgctagcataagtaacacggtcgtagtacctgttttgcccgcttaccggaaagtgggcttccctctccaccctgctgtatggaagagaaggccagctcgcatgagcagggcgcggctgcattcaaacagggtggactcggtctccatccgcaaatcaaacccctccgtgagaatcagaaagtgagtctatttacaaactgattatagattaaaacacacaaacacaaaatccacaagcatygtaaacaaaagctggcagtgccttgcttcactttcctgttacagagacacccaaaagttgaaaagaaaaagccaaagaaagcactgaggggacactgagccaactctgctgtttaaaacggcaccggcaggtttcatttttgcgataaaaatgacgtgtgcacagcttcgcgaatccaaatgctgttaaaggcggcgtgtggggaaagctgcttccaaccacccagataacacggtcacggtcgcctaagcctccttccaggagcctcctcacacaccccccgagctgtgtgcctgtgtgagacacacctgcttatgtgagataacaaggccatgctctcctcccaggagcctcctccacacacacaccctggctgtccacctgtatgtgagacacacctgcatgtgtgtgctatgccacacacactatttctttccccaaacaggaagcatggtatatgtcatggtttgcttttggctgttttcattaaactaggttttaaaatattatctgtatcaccatacatagaccaatctgcgcctttttaactgctgcctagtattccattgtactcctgtgccataattcaaataccccatggatgtggctctcagtggtttccatcgcgtgagtggcatttgcaaacacctgctcttatggcgacttccagtgttgctccccagctcttctgaaaaggacttagtctctccctacagcgcagcgatgctgtatttcattctaggattcatttttgtatttaatttttctgaaattgtggtgcatcttatattttatggtgtccatagtttaagtgatggagtttttatttttctttctccaagacattcttatgaaataaggtgtggccaggtggctcaggcttgtaatcccagcactttgggaggctgaggcgggaggatcgcttgagcttaggagtttgagaccagcctgggcaacatggcaaaaccccatctctacaaaaaaaaaaaaaaaaaatacaaaaattagctgggtatggtgttggcgcctgtagtcccagctccttgggagactgaggtgggaggattgccagagcctgagaggttgaggttgccgtgaggtgagatcacatcactgtactccagactgggtaacacagtaagaccctgaaaaaaaaaaagaaagaaagaaaaaagaaagggagggagggaagaaggaaggaaggagggagtgaaggaaggagaagaaggaagggaaggggaggggaaggggaagaaaggaaggaagggagggaggaagggagggagggagggagggaaggaaaagagggcacattatacaacctcttaggcccagcaaggtgtagctccccaggggttcttctctgggagcatcagtgttgcacatccctgtggatccgcatctcttgcaagacatcaggcaccaggaaggggcaggcaggaggatgagtgcctctcactcccagatggcagacaagggtgcttcagaggaaggtggggtccagaatatgcccattctcagcctgaagctattggcagacacctttctctcaggcccacggatgtgagctctgaagccaggacttgggatggagagttccaatcgtggctgagaaaggacatgtgtgtcctcatgaacacaccacacagaagtcacacactaggaacatgtgccatgtgggaatatgagcatgtcagtaacacacacatgtttagacttcaggctgatttagatgaatccgttttcccaaactctttgattagagattttgcatttatatttaaaattattgtgtccagtgttttcatatctgaaagccatggcagagctgtccttcctttcccacgttggaggaagcggatccagggaggctcggtgacttgagtgggcagggcagccgctcagagcacccagccgaggaagtggcgaagcccagcccccgtcagaccgagaaccatgctgctgcaggctccctaatggccagccatgcagcaggtggcatttgaatgttatttcccctrtctattccatgctccactagaagcggggccctttttactacccccattttgtagacaaggaaactaagattcagggggtctgagtatttctcccagagctgcagttcatgagcacagagtagcttttaaacccgacgcatccgaaaaccacactcaagccttctccccttcccctaattctggaagacctcaccaccaccacagccctcagcaaaccctggcgattgcataacctcaggcccaagctgccagaagccaatgccacctgttttggctgtgggtataaaaattaataaaatatcagctgataaaattggtaatacccaaactgatgttcaatccaaacatctgtgctttaaaaactccatcattgaaatgcattccaaaggtcccattaggttggaaataactggaatctcagtgcaggcactgcagctcccctggttaaaatccctcgtgtgtaaacgcatttccagttaacacacagaagctcccctggttaaaatccctggtgtgtaaacgcatttccagttaacacacagaagtttccctggttaaaatccctggtgtgtaaacgcatttccagttaacacacagaaataagttatcagctcacttagcctgttgcgggaaaagcattcacatgagtctcaaagaaaagcctgagaccgtctcgggattcgtgtgccacaccccgagcagcggctgctggtcagcaaacaagggctgagacagacaaaggcagggatagcgcctgatctgggacagacagacaaaggcagggaccgcgcctgatctgggacagacagacaaaggcagggactgcgcctgatctggggcactctgtgtctggcaccacacacatcgcgaacgttctgtctgatggccacaggggcggtccccagggtctgaaccatcgtgtggccctgtgggcagcatctccctgccttccccatcctccttgtaccctgagaagggcaatcgcccaggaccccccactctggctctccctcgggcaagacaggctgcacgacctggggccctggtggtgccggcggggaccatgaccagcctgcagattggggggacagccttgtcttgtcccacacaccaggaaaccagagagcacagagtccccggggccctgccagtggggtgctggtgcatccggggttccgcaaagcatcgcctctcccagcagccgtctgtgctgtcacggtccttgaatgacacctgtcatgacgcagctttgctgtctctctctcctatcttaatggttcacttttaagtttgtttcaaaaaaactagctccgacaactcccacgcccctttgcccaggatcagcagccgttaatattttccctcatctctcactgcacacactcgtgcattcgcacgcacaccctcgcacatatgagcacgcacacacaattgtttctgaaacatttgagaataacctgccgaccctatatcctctcaccataaatatttcagatgaaattcctcagaaaagacaggctcttctgtaaccactgtttgcttattcaaaatcggaatttaaccttcaataacgctattatccaacataacagcatcctgttgcaatataatatactatattgtgtttttattatgtgttagaaattgtgcctactgcttcatcggtttcctttataatctatatgtttgtagcacaaattggtgacagaagctcactaacccgataccctgtatgtcccacaggtactgagggaccctaggcagttgctgtaattaggcggcaggcaagcatccctggaaccctctgctgacttactcatgtctcaggcctggaagagcatccagcgcttatggcctcagtcagcctgggatggacagtgtccccattatcagtcacagccggccgactagacatcccttcgttggtcactgccggtttaccagacgcccctttgtgggtcccagctaagtcagtcacatataagatcttatgtaggtcacaaaaagatgttcaggtcaaggccttggggtatcctagcccaaaagtccacatcgaccattagccagatttatttccaggaaatacagatactcaggttctccagctgattcattagtacagtctgagctattccccacctagttacaaaaaatcaacagggagcagttagcaaacacttgttctcggctttactagatagacggtgaccgttgcaatgatgctcagaagctgctggggaggggattggccagatcagctctgccgccgcctgggggccactctcggccaccccacgggatcccagccgggcccctggccttcca

SEQ ID NO: 95328 - DNA, 77280 bp, Homo sapiens
agtaaaaaataaaaaataataataataaaaaataaataagtggttgaattgtatagtatgtgatttatatctcagtgaagtgttaaaaaatgtaatgaggcaccgactctcaggtgccaaccctgcacttcacaaacctaagcgcaaaggcttcctcacattttgcaccttgggttctttgccttgcttcactatattcctgcatatgttctgcatccatcccccctttcacaaagataatcatctttttatttgctcttcttgttgtatccccttgcctcgaggcttttatgtaagaaggctaaaagtagaaaattgcttgtgagatacttcctttttgggctctctctttttaacagagtttactagagtttatgacaaatatgtttgtgagcaataagaaaatacttctcttttcagagcaatcacagagcagaatgatacattttgtcaagatttaaagtcttaaagtaggcaggtaatgagagagagaggccctgagctctgcctggtggtagcatttcaaggaatgggcaagattttagaggggatggctatgtggcaaacctagacagaggcttggggttcctagcctcaaccaagtttcctggtaattgcttacaaatggcatgcagggagaaagctgtcagacttccagtgtcagtgaccactacggctctggacaatgcagatgcttgcagaaaccttaatgaactcgagctacagacccttcctgttttccaagtaccagataaggcctgggtggggaagaaaattccagatattaatgaaaattcaaattcttgctgccctaacagaatgagaaattccagtcttttaattaaatttttttttctctttttagagacagggtcctgttctgttgcccaggctggagtgcagtggcacagtcaaggctcactagagcctggaacttctgggctcaagggattctcctgcctcaccctcccaagtagcgaggactacagacatgagccaccatgcccggctaactaaaaaaaaatttttttgttgtcgttttgcagagacagggtcttgccatgttgcccaggctggtgtcaaactcctgggataaagcgatccccctacctcggcctcccaaaatgttgggattagaggtatgagccaccacacttggctagattttttgttaataataaagaaatgtgtatttcttatacagtagaggtttttcttttaaactttttgattttgaaataatttcacagctggrtgtggtggctyatacctgtaatcccagcactttgggaggccgaagcaggaggattgctcgagcccaggaacacaagaccagcctgggcaacatggcaagaccttgtctctagaaataattaaaaaattagccaggtatggtggcgggcacctgtggtcccagctactcaggaggctgaggtgggaggatcatttgaacccaggaggtcaaggctgcagcaagccatggttgcgccacctcactccagcctgggcaacagagcaggacccagtctcaaaaaaaaagaaagaaagaaaagaaaaaaatgatgtcaaagttacaaaaataaaaatagtacaaacaatacccatatatatatattatatatatacataatatatattatatatacataatatatataatatatacacataatatatataatacatatacataatatatattatgtatatatacattatatattatattatacatatatatgtatatatacacacattatatatacataatatatattatatatacataatatatattttatatatacacatatatatttttatgtatacataatatatataatagatacataatatatataatatattatatatatattttatatatacactaatatatataatgtatacataatatatataatatatattatatatacatatattatatgtatgtgatatatgtataaatctgtgaattatatattataatatatataacatatattatatattatatataatatatgttatatatattataatatataatatatatattatatatattatgtatacataatatatattagtgtatatataaaatatatatataatatataatatatacatgtatatataaaatatatattacatatgtatacatattacataatatatattatatacacataatatatataatacatacacaatatataatatatacacataatatacattatatatacacattatatatattatatatacaaaatatatataatatatatacataatatatatctctctctatatatatatgtttttttgagacagatttcactcttgtcaccgaggctggagtgtaatgtgcgatcttggctcactgcaacctccacctcccaggttcaagtgtttcctcctgcctcagcctcccaagtagctaagattacaggtgcctgccaccatgcctggctaatttttgtatttttagtagtgatggggtttcactatgttggccaggctggtcttgaactcctgacctcaggtgatccacctgccttggcctcccaaagtgccgggattacagatgtaagccattcatatattctttacccagccattcacatattctttacccagatccacccactattaacattttcctccatttgctttgtcctttgctattcatttaactatgtaatatatatgtttgcatatatacatatataataaatatttgtatagacatacacgtggtctttttctaaatcattggagggtaagttatatatattatgattctaaaatattaggtccattatatgtaatatttgaaacattatattatatatatgtagtaaatataatacagtcatgtgctgcataaggatgtttcggtcaaagaacggcatatacaatggtggtcccataacattataatggggctgaaaaattcctatgactgagttgatgtcttgatgatcctcacccagtgtaggcctaggctaatgtgtacggtgcttataaagtctacagtagtgtacagtagtgtcctagaccttcccattccctcaccactcactcacttactcactcaagagctactttcagtcctgcaagctccattcatggtaagtgcactatataggtgtgccattttatattttttatatcataatttttataccaaaaattgtaccttttctatattgagatatgtttagatatccaaatgcttacaattgtgttacagtcccctacagtattcagtacagcaacatactgtacaggtttgtagcctaggagcaataagctgtaccatatagcctaggtgggtagtgggctataccacctaggtttgtatactctatgatgttaagatgacagaatcacctaatgatgcatttctcagaacacatccctgttattaagcaatgtatgactgtatacggggaccaagaaggatattctttttcataaccacagttaatgttgccaggcttagcaaataaaaatgcaggatgccatgggcaaattccaacagaaatgaaagctctgagctttcccagactaggggaactactacacttcctctgctgaacacacttagacactgctgttggatttgatgggttctgggtctccttggttaccctccaacatccaaacaataaatctaatccgctgggcaagatttctggtaagcagtaaatgtctgctatgatcttgctgataaaagtgaaggttagttgactctttttttccatgtcttgaaagctctgttgatttggtagtgtttctcagaaatgaactgaataagaattgtcttataaaaaacactgtttaacaaatttaaatataactcatcattagatcttgttaaaatgtaggttctgatgcagcagaactggactggggtatgaaattttgtatttcttaataagcttccagaggacatcagcacagttgtcctcctaatcacactttgaattgtgacagtcaatagatatttcaaatatgcaggtacctaggccctatgccaatgtattgattcagaatctctggaggcagtgtccaggaatattaatttaaacaaactcctagggagatatgagaaccactgatctatgggtttgaaatatcctctatcttattctcaacttgtttattttgtttctgaaagcccagtgcaggtccctcctgcttgatgcttttttcattgaccacctcagatgtaaattcattaacagttgttggcagcacttgctatttatcatgggctttcttttcttacatatatcctgtctcctcagatgttacttctcgaagtgaacaattatatagattcttgtagcctcagctcctaccataatgcttagcagagagtaaatgtttaatatgtatcatggataataatggtgatggtagtggaagatgaatttctctccaggacacgtgactgttgcccaggccttgtgtgattaaaagaacaagagtcctgctgactccacaaaagaaacaatcgttagcaaaaactgcaactcccaactatggcacgtttttcagaaactggtaccacaatccttttgtaccttggtagtttgaattttattatggtaaatggcactttaaaggaaataaagtaatactttgaacttaatatgtcttttatctgtgaacctcaaagcagcctaatgccatttattaagttactgtacagccatgatgtaaatattatcataccttccttacaaaaaagctgactagggaaagagttgtaatgtacttgcccaaaatcatagccattctaagaaggccaaaccaagaaacggaggagtagctaggtggctgacaggtcagcacttctcagcatttcccagacctcaacttaggtgagctttccataggagagacggctaagaagtaacggaagactatttcaatttgggtgaaccratttccttttcctccgtattcccattaccattgctcttggtatcttgtgatgcttatacattcttatatttaggttaaatgccgaccatcttccctcaacaacttccttatctattttccagtaatcttgttctccctacctcctagtttactatagcagcagagatattagattggtacaaaagtcattgccgtttttgccattacttttaatgccattatttttaatggcaaaaacagcaattacttttgcaccgacctaataaaataactgccagctgaggggatctgaaatgagattggaaccctagtttgaccgctcacgaactcggcctcttaggagaggtgtctcagggagtcagtttcttctttgtgtgtgaaacggaaaaggactacgcccctgtaccttactgagggattgaggcgatagaacgcgattcgtaaactgcacagcactaaacggataccactttgtccccttactatgtcattccttgtttaatttaatgccagggccacacagcgcagcataactaatagggatagggcgtgtctgtagggaactacctcgaggtagatctttttcttttgaggaaagggggaacgcggagctgctgggagtcgtagtctcggcggcggtctccgctgagctcagacaaaggaaagaactacaactcccgtgaggcagtgcgcggacagctcgcactgcccctcctcccccaaccggcgcgtgcccccaagagaaactgggggcctgcgcgcgcgctggggacctgcagggcaagcgcaaaggcagcttgctagtggtagccgtgagagcagatcgaggaaaggagacccttggcaaattaaaaaataaaaagaaccgtgcactattgcctcaccacccggacgggctgtaaacccccactacttcggaggcgtggggagcgcgctcccgggctccagtctagaacttcggggacttaaatcagcaagggcgggaaggggcggggcctaaggcgcggggcggggccgtaggcggggcgggcggcggcggcggcggcggagccaggacccagacatctgggactgttgttctctcgcggcgcgaccgcctcagtcacttcgcccagagacccggacctggtccgctggggagcaggcggccataaaccccctctctcccggttccctgacgccgcggcaggagctgttacraacaccctgcggttggtctccgatgcccttcagtgaggtggggacgcctggaccctggtgagcgaaccccaagccaccccccaccccaactcagtgtcttcgccggcccccggcccgtacgcctgtctggtcgccatggctgaaaacacagagggggatctgaactccaacctgcyccacgccccctaccacaccggggaccctcagctggacacggccatcgggcagtggctccgctgggataaggtgggtacctggtcagcccggcaaacgccgtcgcctcccccacacagtctgctctttcctgtgcccacccagcgccccgcgggctgcagaggagatggctcgggacaccgagcggggggcagcggagcagggcgttgccacccacytatgcgtggggttgctccttcggactgccagagccgggcggcaacatctgcatcgcttccttctgcagtgctctcaattgtaacctcccttcctcttctttaccctctttcctttcaagtgctgtcttccctctttcttcaaaaaaaaaaaaaaaaaaaaatcatcatcattgtaagttataccctaaacaacgatttcctttccctttttctcccttgacttccttctccacatacctgaaagtggtttctggcacccttactgggcgtttctaaccgctatccgctttagttctggtctggtgtgtttcctccttctgtcgctaggtagttgctggycttttatcactccctggtattgtctagtrtcaccttttgctgttgggaaaggcaaggcgcttacctcttctttctcctgctggcagctattttctggaattaatctgttcaaggaatcgtgttttccaggtttcatgtggtactcttaatacaggattgtttttgccttaaccattacttctctaccaacacctccccacccaccctccgcccccacctccaagttgtggtggtaattaaacctcgtgcgggcatttgggatgaatttgtgacaatcagaattaaaatgcagctatcttacttgtaaaagaggtccctggtagctccaacagaggaagataatccaagcttttgctttgtcaagtgcgtaaaatacctttgttgaagtagagaaggcagcacatttaaaatggaattaatgacactgaattaaggaatttgtatggtagtatgtgacattatgttgtacaaatgaatttccttaaggcttcactttctgaaagttttgtttttactttattcattcattcattcagcaaaaaaatattgaatgctgagtgcgtgttttaggtcttgttagacccaggaaatacttgtgaggaaaatagaaagggttcctgccctcaacaagcctcagttagcagatgaggaagaccaacaaataagcaactacaatgaggtatttggtgttaattggtcatatgtatattggacgaataattcttcctctacagtctaaactaatgcttctcaaaccttaatgtgcttatagatcacctggggatcttgaaatacaaattctgattcaggaggcctggggtggggccttggattctgcctaagaatgaatttccggccgggcgccgtggctcaggcctgtaattccagcactttgggaggccgaggcgggtggatcacgaggtcaggagatcgagaccatcctggctaacatggtgaaaccccgtctctactaaaaatacaaaaaattagccgggcgcggtggcgggcgcctgtagccccagctattcgggaggctgaggcaggagaatggcttgaacccgggaggcggagcttgcagtgagcggagatcgcgccactgcactccagcctgggcgacagagcgagactccgtctccaaaaaaagaaaagaaaagaaaaaaaaagaatgaattttcaggtgatactaatgctgctggtctgtggaccacacttggagtagcaagactttttgttctctttaggtgcccagttttaactgtacttttcctaatgagtctcctgattgattttttttttttttaaacagggtctcaccgtgttgtccaggctggagtgcagtggcgcgatctccgctcactgcactcactgcagccttgaactcctgggctcaagtgatctttctgccttagcctgccgagtagctgggactacaggcacatgccaccacgcccggctaattaaaaaaaatttttttttttttagaaatggggtctcactatgttgcccaggcttgtcttgaactctgggcctcaagggattctcccacctcagcctcccaaagtgttgggattataggcatgaaccaccacacccggcccctgaattatttttaaaagattgtttgaatgaatttatatttattgattgtccattctatgcctatacattgttgggatatactgaaatattaaagaaacctgtaaaatgcacataaaataataatgctagggtagttttggtggcaattaaatggtttgtaggcagtcagttcttrcagttcaaaagtaggagtaaacggtggactgagatgctcaaggaagacttcattagaagataggatacataaaaagaatgaagagaggtcaggcacggtggctcacgcttgtaatgctagcaccctgggaggccaaggtgggcagatcacctgaggtcaggagttcgagaccagcctggccaacatagtgaaaccccgtccctactaaaaatmcaaaaaaaaaaaaaaaaaaaaaaaaaaaargccaggcgaggtgtcacgtgcctgtagtcccagctactcaaaggctgaggccagagaatcacttgaacttgggaggcggaggttgcagtgagctgaratcgttccactgcactccagcctggatgacagagtgagactccatctcaaaaataaataaaacaaaataaaaataatgaagataaaacttcattgaaagtggaagataaattcttaatttgtatttaaagtgcctctgaatataaggcattagctgaaacctgtgagagatagaaagatgaaatagatatggatcatatctttaaagaaaatagaagggaaggaaaagcataaataataggggcaagtaataagtatccttaacagaggaatagattaagtaatttgttaattatttaataaatataataaatttcttcattgatcctctcttaataggagagaatacatttaatggagaaattgtatctactgtagattgatactataggtaagctagactgtctcagggcactgaaatttagagtgcagaaatgtaaaataagatcagactcatggcatttcttacattatatattgatggcatatgtagtcttttaacatagagaaactgattttaacacctgatgaatacctatttaattaaaaaaggaaccaaatgccaccaattcttcatgactcagatgaggcatataataagttttaaattgattagaggtcaatttgctacttgcgttggtcactaaaattrctaatcttagtctcggttggtgtatttgaaaagtctttatgaaaaaatgttatttgtgcttgaactttcagaattagttaaaattagacttgctaacataaggagaactatgacaagcatagagagaaattttaatgtgtgtattaagaacttttatttctgctgttgctcagggtacatagaaaattttggaaggatgtgtaaagaccaggtcatagaagggctttagtatgtcttgaagggcttaaatacacacaggtgtgtgtgtaaatgttaaaaagaaaacaatgcaacaagacaggtgtttattggggcagtttggggtactccatgtaatttctaaggggtggctttctgttggtaaatttacaagtccagaatgtgaccttccattcctgagccttcagcctaatttgttagcctaccttgtctcaggatgtactcactgtgcccaatgccacagaaactgatgtctgaattcagaatgttttattaatgtatggtacagatgtaatagctaagtagatttgtttctattcagggcattttctagatgcaccataggagaagtcaaaagaagatttttggtggtcatgaaatcaaatcacagggagtcagatatatgacacaaacatttaacagcatcaacctgtaataagtaaatgcacacatctccacaatgggactgtcctaccattagaacccaacaagtcctagatcaaggcatttctcctccaggcagcraacagatgactctactaccagtgctctctccttctatgctctagggctaagtcactcacctccttcctagtttttttttttcagtgctttcttacattctgtcaaattatagaccagttttgctggcccagaagcaggttctctcattataatatgtcctgttctttatccattgtgaattttctttttaaaagcagtcctatatgtaagatgttaggcactggcaaagtggatggggtcagtggctggatggggaatagagctgggacacaggstagagctgctcagcctgctatagcagctgtcacaaaggtgttgaacttcctatatatcaacaacgatgtggaggcaggaattggccacggcattttaagaaatagcaagtagagcactgtggtctcagaatgtaggtctgcgttgagaaagagtatcatgtaaagttcaaggtagcgtaggcttataaaaagcctgaaaatggaaataaaatacttcaatctaagccagtgattcacacattagtctaatggtagaagttttttttccaatgtcactcacatgattttctgtgcctcctaatgtagcccagatagaaaagrtggtgagtgaatttccttttaagtcatcattatgtgatgggaaatacacctatgacatacctgtacaaaggtggtctactccagggtcattgcgtagagacccaaagaaattgtggacattatccagttggggagcttagatgggagcttggatctgccacctagttcaatccaatttttataatactagtttatataacattttttgttcacatttttctaatactgaatttggcatttaatcaatgaagagtacacagtatacacatatggctttattacttttgggaaatgctagtccttattccttgaatttatttttgtagtgtttcaactttggtaaaatgctgttaagtctcatttgctattcatagcaacagtgtgttaggcaggtagtagttatccccaattttgcaagtaaagaaacttaagctcataaaagaaaagtgacttgctaaaggagatacggcttttaagtggtaaaattgggactcaaacctaggtcatctgacttttactgtattcttatcactagggtagactccataaaccaaatgtttaataaatgttagtgacaacataaactaagtttcaaggccctcattaaaactgttttattggctggccgggcgcagtggctcacgcctctaatcccaacactttgggaggccgaggcgggcggatcacaaggtcaggagatcgagaccatcctggctaacatggtgaarccccgtctctactaaaatacaaaaaattagccgggcgaggtggcgggcacctgtagtcccagctactcgggaggctgaggcaggagaatggcgtgaatccgggaggcggagcttgcaggggagccgacatcgcgccactgcactccagcctgggcgacagagccagactccgtctcaaaaaaaaaaaaactattttatkggcttttataaagctggagtaggatgtaatattatgcagaataaattgccmkggattttttttttttaagagctgaacagttgctttggtctccttggcaacacagtattctccttctgtccaagaaatttagtacatataaatgaatatttgaatttttctttttagaattcaaattcatttttttctttatacttccaaatttcctacattttctcctgttttcatcattttatttgcaatttattttttttgaagaaatacatgcttatgattttaaaaaatagtacagaagggattataatggaaaacaatgatcctaactgcctcttcttttcctcagtttgctccttataagtcattttaagtttctttttagttatttttgtggttaccatgaaaagactaagtaatatactagaagcactatttcttgatgtattttaaagctttagatattatctgtcaaatatatccctgtgctataaaaaatgggaattcactcactattctctatgtctcctaaattttgatagttatgctattagcattagttatttcaaaagtttaaacaatataattaatgctagcaaagtttgcaggacaataagtgcaactaacaaacagggcttccaactggccattctatttaagaggagactggcagaaaacatattgtatacatgaaaacagagaaaacccataccagcttatataaggtacctagcgtagtcaaatacacagaaacagaaaacagaatgttgggtaccagcggctaaaaatctattgatgttaataactaactaacgatcaaactataaaaaggaaataagctgcatgaaaaataagtaaagcaatggatacaggaaaaaaactgagttaagtcagggaacacaagaacttaatgttttttgattaaataagacaattattccatcaaataaggaaatatgctatgaaaaaggaacaggaaacaataatgagctcttggaaattaagaaaaaaacgttacaccccacccctgccaaatgcaatagaaaatatagacgttaaagttgaggaaacatagcaaaaggaaataggaaatatgaggaagttgatgtggagtaacttccccagaaatccmatgtaaagaaatcctagatgaaaatagtgtactgatccacactggggttccagaaatatatcttgaaaaagaattcrgcatctatgccataaatagtaaaaagctggaagatgttagtaatatggtgaagatggcgtgttgtttctggtcaacaacattaaaaaaaaaaagaacagaaaagaaaaagcagttacccaaggaagggagggagggaggaggaaaacaggaagaaagtaggaagggagggagggaaggaaagaatgaaggacccaaataagcaaggaaagacaaagctgagtaagttaagttatggtctaaaaatgaagccaactaaaatggggcatcattttgaacaattaattgatggatcttaaggaaagaaaaacagatctccagaactttttcatcttgctaaactgaatttctgtacccattaaataactccccatttcttcgtcccctaagcctctagcacccaccattctgctttctgtttctatgaatttgactaatctaggtacctcatataagtggcatcatacaatatttgtctttctatgactagcttatttcacttagcataatgtcttcatagttcatccatgttgaagacaagatttcattttgattatagaacaaaatgtacatgttatcaagttattttgggtttgggcttattgcactttgtttcatgctactttttgtacgtggaaattgcatctactcttcagtacccactgatcccttcctccagttctttttacattgtaggtttagtcctttcgttcctttactatcactgtaataagttctcagggaggggagacaagtgtttaagtctttcatcttgacccaaaaatctttatacttttatttcttcaaattaaaaatgtacttgaaactgaaaacagctaagatgtccttcaataggtgaatgaataagcaaactgttgcatatcaaatattattcagtgattaaaacaaattagctgtcaagccacaaaaagagatgagctatcaagctgtgaaaagatgaagaaaccttaaatgtagattgcttactgaaagaagatggtgtggaaaaactacacagtgtagtaatttttccatagatatatttgaaaaggagtgattcatatttgaaagctcttcctgtctcacctgacagttttcaaaataggtagactagcacttctgtttgttatttgggggacttctttgccctgttttttttttttttctttcataaaagctgtttgtttacttccttcaagttttctttttttttttttgagacggagtctcgctctgtcgcccaggctggagtgcagtggcgcaatctcggctcactgcaagctctgcctcccgggttcacgccattctcctgcctcagcctcccgagtagctgggactacaggcgcccgtcaccacgcccggctaattttttttttttttttttttttgtatttttagtagggacggggtttcaccatgttagccaggatggtctcgatatcctgacctcgtgatccgcccgcctcggcctcacaaagtgctgggattacaggcgtgagccaccgcacccggccagttccttcaagttttctacaaggccgttagaaacctattcggatatgtctttgatctaaaattattttcccggtcgggcgcagtggctcacgtctgtaatcctagcactttgggaggccaaggcaggcggatcacctgaggtcaggagttcgagaccagcctggccaacatggtgaaacccccatctctgttaaaaatacaaaaaattagctgggcgtgrtggcacttgcctgtaatcccagctacccaggagacaggcaggagaatcactggaacccgggaggcggaggctgcagtgagccaagatcgcgccactgcactccagyctgggtgacagagcgagactccatctcaaaaaaaataaatttttaaaaaagtatttttcctgtctcttcctctcctcttatttaaaaaaatcaaagaatatggataatctaataaaaaggaatttatcatcatttgattcttccaggttttacttgtgagatacattgaattaacaaaagaatatacatcttattatatttcattagctcagggtttttgttttgttttgttttgtagagaaacagggtctcaccctgtcacctaggctagagtgcagtgtgatcatagctcactgcagcctcctgggctcaagtgatcctcccacctcagtttccggagtggctgggactacaggcacaagccatcacacctggttacattagcttagatttcaatgataatccctggataatctaaatcagaattctttcatccttccttttggagagacagcacaattggcttgtctcatggagaaacctgtttttacctaatttatgtctgtttggctttttagaaatattttccctcaaaataaaaggttgattagtaatttagtgcagattttactgaaggagtattgttttcattagtcaactgtggtctgcattactactaattagtactgaggctgctgccctctagtrtcgggagttaatggagaaaatgttctatgctggtgaagaatagacaggaaggcagtgagatagtgtcaccaatcctcatgagatcttttacaccaagtcatttaatgaggagtgtatcttaccaaacaaaacaatggaaatggtcatatttaatgccttaaagagtatgaagactataatatggtaaatgaaaaataccatatctctctgattcaaagacattttaatgtctaccttgttagaaaacctctttaaygtaagtaatggttttatgttgtgtttctgcttcagaattttttcacgtcattttctctctgaaatatttcattatttatataggtaaaaatgagggaaaagcctaagtgtccatgaataaataaatggtgacataaactggaacactctggagtgaaaagaatagcatggctctatatgtattaaaaggacctccaagatatatagatataaagagagatatagatacataggtgtataggtttatatttttttaattttattttatcatattaagaacacttarcatgagatttaccctcttaacagattttccagtattcaatatagtatggttaactgtaggtacagtgctgcacagcatatctctataatgaattcatctggcttaactgcaactttatgcctcttgcttagcaactctccattcctccttcccttccagcatctggcaaccatcattccactctttaattctatgaatttgactattttagatacctcatataagtgaaatcatgcagtatttggccctctgtgcaagatatacatgaaataagcaagttatagaacaacatgtacaatttgatgccatatatgtaaaaaaagagttaaagcaaaactgcattttacaagtatgtagatgtgtagtaaaggtctggaagaatgtattacaagctgtaagcggcacctctaaaggtggggtctgggaatgaaagtaatggtcaatgatgtctgcagctttatctgtattattagtatttttaaaataagagaaatgtgttactgtaattcataataaagtaaaatttaaaatataaataaaaattaagtggttaactgtctgacattggcttttaagggcaataggagttcaaagtcaggaagattttttgtaagagrtagaatttgagctgggacttgaagggtaagtaggatacaaatagataatggatatggggcaaaaatttaaaatgggcacagtagaatmataaaatggaaaatgacactgatcagggaaatgaaactgagcaggaggcatgcagaaaccatgaacagatttcttaagtatagcgtatgtattgtgctactatggtgagtaagtataggtgaaggaaaactagtgtttatgagtgatcatgtaccagacatgrtacttactagatgctttcatgtagaaagtctcttaattctcccaaggattgtttgaggtagttatttccatttttttaagcctatgcacaaacccaggctcagagaagtgtagagagaggggactatttgaatccaagaaggtttcaaactcctttgccctttgggatctgaccccaacctttctaatttttacatttgrtgtaatgagaattgaactctattgctgattcttggctgattaatctggctgcagcatgtaattaggatgagatggaatggagttgtggaggggatcctggaaactctcatagaaatgtagatataaaagttttacataaggatgtttgctttgtgagaaaatcaggaaaagaagccataagactcactagcaaattgatctctgtcttctttttaaaaagacagaaaatgatagttcccatttcgttaaatcatatattttgctaactttgaatcacatcttttaaaagaaagaaattataatttaaattcacatgyccacctctctgattccattttcctcccttcttcctttcctcaaagtaaccaaggcatatctaggaatactagggttttgtttgattttctttttcagttaaaatatcattttgtttttcacttaaatgaagataactgtgggaggctgggtgtggtggctcatgcctgtaatcccagcattttgggaggccagggcaggaggattgcttgagccccagagtttgagaccagcctgggcaaaatagggagacctcatctctacaaaaagtaaataaaattaggtgggcatggtggcatgtgcctatagtctcagctacttgggaggcttaggtgggaagattgcttgagcctgggaggttgaggctgcagtgagctgtgatggcaccactgcactccagcctgggtgacagagtgggaccctacctcaaaaaaaaaaaaagtttttttttttgacagatattgccaaattgccttacagagagtgtgcaccaatgtattmttctaccaataatatataaaagtgcctgctttctcaaattcttgactctaccatgcagtatcaaatatttttctttgccattgtgaaaaataaaaactatattttattttagctttaatttccatttttcttataagtgaggttgtatattttcatatacttaaaagatagctgtatttccttttctatgaactattcatatcttttgctagcttttctattgagttattaatcttttctcctgttttaatgccaaagaaataagtctttgatgtatcaygtattacaaatgtttttttctcagtttgtcttttgaatttatatatgtaatttttatcaygtagaacataattataattttattgacagcatagtatttcacttggtaaatatatcatatttaaccatttcctttttgctggatgtcttaaagtattctgatttttaaaaactattttgaataatgctgasagcatcattttgcatataattttttcccttagattatttctataacatgtaaagatgacatatacatgatacagagatatttaacttctgggaaatgctgtcagaccataattgtagcctaatttcagaagaatatggaatttgggctttattgaaaaagaaaaagcatattattgtttcctttcttggtggtttttatgctgatgggcagggttctcctgttggtagtattttcgccatttcaaaatatgcattaaacatcaagccatgaatcttttgtctgagtatacgttaaattaagcataaaactatggaatctcagttgacagaaatatagatattatcttatttaagctcctactcagaataaaaacatgttctgtagtatcccaaataggcaacttccgtatgagaacatttctggtataatggagtcttgtcttacttaggagttagattccaaagtcaataaataatgataatggtataaaattttaaaatcacccttgtaaacccttaaattgtccaagaactacaagatacatgatttcaaatatctatccttacacagtaatatatgagaatatgtaacatatgtagtaatgtgccatatataatagagcacatacacaaaatacaattttaatatttaggaggcagggctaaatacatatagtggagtacatgtaagttaagtgtagtaaagccatactatatagtgcagtgttgtaggatagaaagatttctgcttctagaaatgacagatgaggtaatttggacaatcttcctccaacaactggaaaaaacagacaaaatatagatttaaaaatctgtttgaaggtgttatttaatgttagtcaagagtttccagtttaagatttggaagaagaaggaaattccaggccatgatctagaagaagacagaaattcagagagctgagtttagtatttagggggccacttttgcccagggcacatttattgatcaggataggcagctaagaagattgtcagtctttttgttagccttgctagtatagcgggacaaaagttggaatctaggccctattgcgggtggagaccctgaaaacactcttactttaggttagaagtccaaagggctgccctgtgaatactggtgaactcaaagtaaacactccgcatacagactatattccagttttgagtcatttggatggcttggaaattggattaaagtgaacctagattgctagtgctttcagatgcctaagaaaagcaaaacaacaaacaaacaaacaacaacaacaacaagtttcctggagggaggtagcttcatcttagtttccaaattattcctactaataatattttaaatataatacctaatattacaaaaataatataaatataatagtacagagtcaaagataaccaaacatataaggaagcaagtcaacataaacaagaacctgcagaaacaacagataatgcaaactgaccggcaagggctcctatatttatcaaatgtagactttaaaataactaagattgtcaagatcaagaagattaaaaaagattaaaattgagcagagagcagaagtaagagtaatctcataagttaaaaaaattggtggagaaatgaaaataatacaaaaagtaaatttttaaaaatagaaattctgaagctgaagaaatacaataaccaaaattaagaattcaatgaacaaatttaacaacactttagagaggaatcagagagagaattaacaaactacaagataggtcagtgaaaaatagtcagaacaaagcatggaatgacaaaaggatgcggggggagtgggggagtaaaagagaggctacgagacataagatgatacaggaaaaggtctaacatgctattcattggaatctcttaaggagaggaaagagatagttactatgaaatttcctaaactgatgaatgacattaatccacaggttaagagtttggggttacaaaggaatataaatcattctattataaagatatatgcacacgtatgttcattgcagcactattcacaataacaaagacatggaatcaacccaaatacccatcggtgatagactggataaagaaaatgttatatatatatatatatatatatatatatatttatttatatatctccatagaatactatgtatacataaaaaggattgagatcatgttctttgtaaggacatggatggagctggaagccattatcctcagcaaactaacacaggaacagaaaaccgaacaccgcatgttctcacttacaagtgggagctgaacaatgagaacacatggacaccgggaggggaacaacacacactggggcctgtctgggaggcgtggggagggagagcatcaggataaatagctaatgcatgtgggacttaatacctaggtgatgggttgataggtgcagcagaccaccatggcacacatttacctatgtaactggcacatgtatctggaatataaaataaagtaaaattttaaataaataagagtttggggttaatttgtattctgtaaacttttctccttgattacataagtaatccttccctataaagatataaggaacaatcacatttttttttagttttatttttctgtgcatttatgtgtattttacaaatttggaattgtaytgcatgtatggtttatatacttactcccttaatatatctaagtgtttttgcatattaaaattctattgtgattttttaatacattattttaatgtattattacatcagcctttttatttaaccagttttctattaacatgtggcttgcttacttttttattattaacattactttagtgaatatccttatgactaaatcataacrtgaatccgtgattatttccttgggataaatttctagaagtagaattgctaaaacaaagactatttaatatttaagctacttaaaacattggcaaattgtcatctgagatgttgtattgatttatagtccctctgtagcagattgtrtttttaaagacggctgcacctatatgtcccattccacatgctcttcttattgtgtgactttggtactcctcaattgaaaggtgggatctgtgttccctctgctggaacctgggtggacttttgtaactgtctaaagaaatatagtacaaagcaggtgcggtggctcatgcctgtaatctcagcactttgggaggttgaggcgggagtattgcctgaagctaggagttcaagcccagcctaggcaacatggcaagacccaatctctacaaaaaattaaaaagttagccaggcacagtggtgtatgcctgtagtcccagttacttgggaggctgaggtaggaagattgcttgagcctgggaggcagaggctgcagtgagctgtgtttgcaccactgtactccagcctaggtgacagagtgatactctgcctcaaaaaaataaaaataaaaataaaaatagtaaatacagtgcagtggaagctaacctgcctttcagggctaggccataaaaggtaatatgacttccacttggcttgcttgctcatgggacacttgcctttggaacccaacattgcaaggaaaccgaggccacaaggagtggcctctgtaggtgttccatttgatggcctccactaggccccagcctacagtcagcatcactgccagatagacaagcctacagcaggacacagacaagccatcctggctgtgccctttctgaattcytaacccatagaaactgtgaaagataattaatgattattgattgaaaccattaagtttagagtggttttttactaagccataacaataaatacactctcattctccagcactaggcttattcattttaaaaactcttaatcaagttttgggtgaaaaaatggtatcttgttttgattttcatttccttggttactagagttaattttcattccccagcactgggcttactcattttaaaaattcttaataaatttttaggtgaaaaatggtatcttgttttaattttcatttcctaggttaccattggtgggggtgggggggaagcaatggttagcgtgctgggtatagatattatttcaaattcagtaagtctaatactgaactcattatctctctactcccaacttgttcctcaccctccttgctccacaatccaactcctactgatctttcacttttcagttcaaatattacttacactgggtgcagtggcttcacacctgtaattctagcactttggggaggccaaggcaggaggatcacttgagcccaggaggtccgggctgcagtgagctgatatatccccactgtactccagcctgagcaacagaacgagactctgtctcaaaaaaaaaaaaaaaaaaaaaaaaagacaaaaacacaaacaaacaaaaaaccctacaaatacgccaaagtttcagtggcttacacagtgaaaatttatttcttgctcacgttacagcccagggctggtccatgaggtaggaggtaaaagagggggattttgctccgtgaaatcattkattccatcttgttgctacatactcctctaggtccttagagtcctctctgtttaatgggtaartggggaaagaggagtggtgggggagtaggtctggggctaggcatggaagtggtgcacatctctttcatatccagtgaccacaactctgtcacatggtctcatttagctccaagggaggctggcatggtgcccaggaagaagagtagaacatgattcctgttttttacaggtgaggatactggagtgaaattacctgttcaaggtcataaagctagtaatagatgctactggaacccttgaacttagtatacttagtgcctcacatgatcacttactgacaaaacctgtagagtttgaaaagttaatctcaaaaatcatcacatctgcttggaatctaaagtctaaggaaaggtgaagtgacttgttcaggatgatctagctaagcaattgctgactcaagatcagggccaaaccttctagaattatagttcagtgatctttctctcctgcagtggtctactgagcacattagccaataattggattctttgttggtcaagaaaagtatgatgtgtcagaatagttgtagaaagacaataaacatttgaaatattttatgttgactaccttatatgagaaatattttttacttaaaacttaacagagacaagttagactatgtcattgaacagtaaaattgagctcaatgtatgtgctttgttaaaattatagtttttttaaaaaaagataggtttttttgaaacaaaataattaacttttttaaatttttcacactaatttggtatatctaatattcttaaatgataatatttcaaggattattttctactttgggggtaattagtacttcatttcatggatatgatttttgtgtttattaagcaattattcaaataaatctcattttatatgatgagtatattttatattcaagttttttatctaagccaaatttatgttaatttctaccaattttttaaagatraggaaattaaatttagaattacacaaaaattatttaaataggaaagaatgattggtttagcatgaatatattttggacttaataaagaaacatctgatttagaaaagctgttctgctccaagactctagacttggatcttcaaatcggcttaccctcagaagtaaatgtcagctgtgtttacctttcagattttcagattgcactttcctgttttaacttctggttagaaataaactttaaaatttgtttgtctttcattcaagatgaggggcaaaataataaatagataaacaaaataaaaatgtttttctctgtagttatataaaactggtatttattatttagacacaagtctctgtcagtaacatttaaaaatgttatgtacaattttgcaactttagaagtatttgagttcttaagagtcaattttgtatattggctcccctttagatgtgtaacaatattagaatttgggatttttttttagacagaatttcactcttgttgtccaggctggagtgcaaatgkcatgatctcggctcactctaacctccgcctcccacattcaagcaattttcctgcttcagcctcccraatagctgggattacaggtgcccaccaccatacctggctaattttttgtatttttagtagaggcggggttttaccatgttgtccaggctggtctcaaactcctgacctcaggtgagccatccacctcagcctcccaaagtgctgggattacaagcataagccaccgcgcccagcctgaatttgggatttttaatatatattatgttcttttagatctgttccaatcttctaaacaatacgattcatgtttttgagtgtatttaagctgttaggttttgtactagaatactaatagagtagattcaaattgtgttagaattattaaaatagtaggtttataagataagtaggaaaaaagatttacaggcaaactctttaatatggtttggctgttttgtcccctgtaaatctcatgttgaaatgtgacctccaatattggaggtgggtcctggtgggaggcgtttgggtcatggaggtggttccctcatgaatagcttggttctctgctggtgataataaggagttgtcactctgttagttcacatgagggctgattgttgaagagcctggcagctctcttttgttccctccttcaccatgtgataggctggctatccttcccttctgcgatgactaaaagcttcctgggcctcaccagaagtggagcagatgctggtgctgtgcttgtacagcctgcagaaccatgagccaaataaaacttatttctttataaattacccagcctcaagtattcctttataccaatgcagacaaactaacgcacttctcattggcaaacttgattactttttttacactcttttatagacatttatatttattatacataaataatatagaagtccctagttatgaacagaataggttcagaaaacttgggcaagttcaaaatgatccttcataagtgaatgttaatactttcattggtcagcaggcagagttgatgtgaattttggtctggtgtgtaaccttctgcacatctgtgaaagtttgtaagaagttaatttttttaagtggttttggaaaaatcaattctttcatgttttctttgaatttgggccttatggttctacaatatagaaaaaagaaaactccacaagtactatgtaagaagacactttcttttcttcatttcagccatgtaargttgaagcaaaccataggattagaacctaaaggaaaatttttggtatacaggtaaaatttgaaaataatgtatggcttttttctgtattctgcaccttactgatttcatactaaacaattagctttattactgatgaagtacagagaaatgctagtagtcactaagatcttttggattttctgcaggattacttttttggagtactaaaattgttaggattctaagatatgctagttaaaagcaaatttatttcagattgaatgcatttactttctaaataattaattttcattttatataataggtcagtgtgtatatttctttttctttttcttttttttttaattgagacggagtcttactctgttgcccaggctggagtgcagtggcgcaatctcggctcactaaaacctctgcctccctagttcaagtgattctcctgcctcagcctcccaagtagctgggactacaggcacatgctaccatgcccagctaatttttgtatttttagtagagacaaggtttcgccatgttggccagactggtcttgaactcctgacctcaggtgatccgcccgcctcgacctcccaaagtgctgggattacaggcatgagccaatgtgcccagcctggtatgtatgtttyttcmaagcaggtcagtcmaatagttttcctactgtcttcctcctcttttttttttttcctgactaggcttctacccccaagtaatcagtgaattgtaaataagagagcacattcagaaagcaaacaataatttgcatttgagagaaagccaatatatgttttatagattcagatcttatcagtagctttctgtgaatgggaaaaggagagcaatttgtgaggtaaaaaattattcacatagacacacaagtagtggtttttctcagccatcatgaatacctaactagtttttaaccataaaaaagtgatatatacataaaatatccaaacagcatcatggctatccaataaaaataagtcacttttctacttgaaaccccatgcctaatatccccttcagaggtaatcactatttttagtctcttatatttgcatggaatacttctagatgatatataaatatacacatacctctttttatagaaatgaaaacactgtatatactcttctgctctccttttcatttactatacctgagttctacataaaaatttcatttaaaaataattagttggccggcgcggtggctcacggctgtaatcccagcactttgggaggccaaggtgggcgtatcatgaggtcaggagatcgagaccatcctggctaacacggtgaaacctcgtctctactaaaagtacaaaaaattagctgggcgtggtggygggcgcctgtagtccagctactcgggaggctgaggcaggagaatggtgtgaacccgggaggcggagcttgcagtgagccgagatcgcgccactgctctccagcctgggtgacagagcgagactccgtctcaaaaaaaaaaaaaagaaataataataatgataattagtttataattctttagaatcttcatatattatagtttataaaatcgtagtgatatattgactttagcaaaaaaatacaaatgtaagttcatctgaatggagaatatgtgataattatggctgcatagatagttttttaggttatatttttaaaagtttataacatcaacatctaaattaatgtctcactgttaaataggggagaaatctgagtgtaaagtagatttcaaatgccagttgtcataattatttagctttttttgccatacaaatgtatttattatgtctagtatatcatgattttttattcatttttatttttctctaacttaccagtttttcaacaaccaggaattaggttagtactggttgtgaagtctgtaactgggaatggaatttttaggccctactctagtagctgtgcagttaaacattaggaagtatactcagtaaccaacagcatttatgtctgctggatcatttatatatgtgtgtgtgtatacatacgtatatatacatacatatatgcataatgtgtatatacacatatatactcattagatatatatacatactacatatatacatatatacatactgtatatatacacacatatatactatatacacattatactatatatacatactatatatatatacacacacactatacttgttataaaaaggaatatcgttttgctttgtaactggagttaaattgttatcagaagcattattaacaccccaacacaattattttgtttgtctgtagtgagatggtgtaggctttagagccagcccagcctaggttcccatcctgtctaaatttccaatgccacctcagtgatactaggctccctctctaaatcttagtttcttcgtctacacaatagtaatattaataataatactatccatacagatgctgcagtgaacattcttatatgaataaatgttattgttcatgtgaaggtatttttgtggacagaaatctatgggccaaaaggcatgtgcaatttaaaatttgatacttgctgtaaaagcactgtaaaaagactatcccagtttacattcctactagcagggtattacagtgctatgtaccctctaaacgtgaagagtctattcaatttttgccattcttatgcccatctttaaatgttagccctcttcaactctctttggcctctctatgaaatatcatggtatcttagacatgataatatcccagatattgttattcatatttttccataatagctattcatatttttatgtaggttatttgttagtgtgtgccatttatgaaacagaaactgcttgagtctggattttatatatcatccattagttttaagcagattaaaatttcagttaatctcattcaacttctcattagtttggccatgtactctggttactttaatttctactataaccagaaaaccattttgtttaaattgtatattaatatgtttttatgtatttctaaggacaaatatactgtaatatttagcrccttttatgtgcactggtttattattctgaatattcattatcattgtatatactatggatgttgaagaagcaaatagaatggactgaattcatattaatcttgaagagagaagttatgtttcatcttatttccttaatatttgacttttccaaaaagaaaatattggaaaattccatgtaagtcttactgttattataaatgcatttctatttgaaatttgatattcttttgtgaagcaccattttcagtgacaggtattcttgagatttatgaaaataagttaaagtacacgacaatgaaatacagaatcccaaatatagatgttggcatgcmctgcctcacaaaccgtgtttggaatgaatttgtattctcattcttaattaaattcacacttaacacataaaacgtttttatggtcaacttgtgccatagataaattgaatcgttttctgtgatttttaaggagtagaattcattttgaattgcagaggtctaggcaggtaactggtaggcatgttttgatggtatttatccagtagtgtctctatttctcttaaaacttaatgtattagccaggtgtagtggcacatacctgtagtcccagctactcaagaggctgaggctagatcacttgagcccaggagtttgaggttacagtgaactatgattgaaacctaacatagactctaacttaattgatgtcgttttttactaagaggtttattttggattcaaagctcttaaatatcaattattttaaaagaacattctttgatatgctatacaaatactataaaattaaaagatatataaatcaccctcaacaggccctttctcctttggggactcagtgaatggcaggtattattttattatacatacaaagaagtagcactgtggaatttatattgaatgttgaaccttgtgatatgtacatattgacccctcagaagggcttaatattaggactctgcttggattcctggttaagttttaatacttcttttttatagaatcccaaaacaaaagagcagattgaaaacctgttacggaatgggatgaacaaggagctgcgagatcgtctttgttgccgaatgacttttgggactgcaggacttcgttctgccatgggggcagggttttgctatattaatgaccttacagtaatacagtcaacacaggtaagtattataaagtattaagagtgtacttttgactggmcatggtggctcatgcctgtaatcccagcagtttggraggctgaggcgggcagatcacgaggtccagagatcgagatcatcctggccaacatggtgaaaccccgtctctactaaaaatacaaaaattaggtgggcatgatggcgtgtgcctgtagtcccagctacccgggaggctgaggcaggagaatcgcttgaacctgggagtcggargttgcagtgagccgagatcgcgccactgcattccagcctggcaacagagcgagactctgtctcaaaaaaaaagtgtactttttctcagtctgkktttttttttttttttttttggctttataaattaggtagtgccattctaaacgcacacacacacaaaactttatttcccagaagttactgttatgtaagtaaaaactgtagactcaattctgacctttagtcttgctcaagattttagaagtcatttatgtatcttcatggtcacagactgactttctgattaagcgttattttggttgccattgtcaacttcttaacaatgttgctttgcatttgaaaccaagaaatgtatattagcatatccaattaatacaaagaaacaaacttagatagaagaaaataattactcattttggcatatggccatttataaaggttaaccagagtatttggaaaatttagttgaaaatattttcctytatcacatatcctttatgtggttttctatatccacatgagagttaatattagttgtgtaatatgatataatttgtgttacttctctccattgttatgcagctcactctagaaacaaattgcttctctttgcagtgaatcatcctgtttcaaataactatacttttgaggccaataatgtatttagcttatactaaaaatagttctgggctagagaattgttcagtagacataattctaattgatactcccaaacagtaaatcatctttaaccttattctgagagaattctctaaagccaaggcctaatgcaggggtaggagagaaggaatgacaggatggttacataggtagaatacctgccctccttcctcacccacacctccccctattcctcaaccagagatgctttagttcattcttttcttatacatttagtctcttcatatgctttgattcgaagtaaagatttcttgactttacaaaaaggggtgggggaggtgtttgaaaakcaatttctacagaagtgcacattttcactggatttgggattccatggtgtgaagtggaaaagctggatggaatctgattcttaagccctagcccttttcactctattaggttggtgcaaaagtaattgaggttttggtcattttttttaatggcaaaaactacaattacttttccaccaacctaatgcatatagagaaataagatgcattctgatagcagagattaatatgagggtctatgaggttttaggatagtatcaccatgagaaataagttgttgaatccagctgatatactaagcatgcactcactcatagcttataggttggggaaattaattrtacttgagagactcaggcaccagaagtcactgggactttgtttggtgctaccacatacttatttagcagtgcctgccatataataggtcttcaataaatcagtataacttmgttttagttgaatgaatggccttaggcatgacattacatggagctttaatcttattgtctcctattcttaaaagaaatattgaaagagaccaaattagaaatggtgtctgcgtttctttcttttcagggtgttaggattacatgtcccatcttttatgtagaactaattttaaaggactgtaataatataaaatgttaaaatgttatttttagatattaaagtatttattaaagttaaataattcatgagatagttaaatggttttagtttgtcattgtgatgttttcaatatgaaatactttttcattattttgtcatccatgactgcaaattttcctagtctatggtgttatttttctgtgagattttaaaaccaaagaattacaaatgggatcatccatcataagaaatgttctagtgaagaactgtgttgctgattaaaaatgtttacatcataaataggtcaaatcttttggttaacttcaatcatatgatctagcaaggacttaagacaattaaaattctgttttctagagccttcagacaagaaacaattttatgttggctcttctaatcttttttttttttttagcttattgacgctcatgtttcttctgctttycctaatgttttacttattgtattggatttagtggtttagtagtggttactaaatcggtattyccatggtattaaatgtgtctgaaactccaggacatgtttgtcatcttacatttctggattgaacagtattgctcccacactggtaaacatgggcataaaggcagaagccacttccctagcagccagtcagctgcacagcaaacataaaaataagagattctgagtcatatgaaatgcaagcatccattagaactaatcttttgtgtttatttgcttcaggggatgtacaaataccttgagagatgtttctcagacttcaagcagagaggctttgtggttgggtatgacactcggggtcaagtaactagcagctgcagcagccagaggtacaaagttaattgtttcaaagattaagytgaaatagaataaaacatattkaaaacatttttttgtctagtagtaggatttctgaaacagtagactgtcagatagaaatgtgatcacatgctaatatttactttaaagctgaamtagaagaaaaagtatctcaaagaaaagctttagattttacagaaagaagtaaaaatttaaaatatttagagttcatatttagaatgacatcatagcttataactttaatattttggcaaaggcaccgggtagtagtaattatgtagcttatattctcattatatgcctattagattagttttagggtgtttttataaatagataatcatgtagtgatatctttcttcaggggtaataatgcatattgagtttatcaaagtctcttatatcactttttccattctttttgccttttgcagattttatttcttagtaaaagagccatcaaaagatgaatgagggaaaaagaggaaattgaaatatcaattatgttagttgttaaactcttcttttaaaaaaacttatttatttaaaattttccaattagggcatgaagtttaaataatcagtgattataagaaagggctatattaggatactatttattcagactaattataatatgaaacatttatgtggaaggttggtttttaaaaagtatggtaggcaaaggactaagttaaatctctctttttttaggcttgctaaactcactgctgcagtcttgctggccaaagatgttcctgtgtaccttttttcaagatatgttcctacaccttttgtagtaagtgtgttgtgttggtgatcatatagcttgctgctcttgaaaacatttcttaaatcaactaggattcaaatattttttgtgcatgtagttctgtattgagtaatataagggaccaatggaaggaaaacaaattttgctttgagtttattttcattcaacagacatttgttaaacttagctaagaacttgatctataaaagtwgacaagtctacagttatagtgaaatatgttaacatcttctttcagaaattgattcattgggcagacaaaaatgatgaaggatagatttgaacacattgttaacaggcttgatctgggtgtgtgtgtgtgtatgtgtgtaaaaattctctattgagtgacaataggatttacattattattaagcagaatcacagtctcagcaaatgccaaagaactgcttatcaagccatatacctggatyccatgcaataaaatcagaaataaaaaagcccataaatcttcccctgtttggaatttttaaaacacattcataaactattcatggattaaggaagataacataatgcagattagcaatgacagacagtccttgctttgcacggagcgtgggggctataaagacagctgtacaagccaaaaccatgccaaatgatcttaatcataaatgagaaaaattatgactgttccatgacctttaacatttttttttgccaaaacattaaaaacactcttactcttggttaaaaatgtatagggaaaagaaaaaacaatgataaaatgaatgtttatttagtacattgtaatttaaaacgttaagaaacattgataactaaagtactttatttctttgtaaaaagaacttatcaggaggccaggggcaatgtctcatgcctgtaatcccagcactttgggaggccaaggtgtgtggatcacctgaggtcaggagtttgagaccagcctgaccaacacaacgaaaccccatctctactaaaaatacaaaaattagccaggtgtggtggtgcacgcctgtaatcccagctactcaggaggcwggggcacgagagttgcttgaacctgagaggcagagattgcagtgagctgagattgtgccgctgaactccagcctggacagcagagcaagactccatgtcaataaataaataaattaataaaacttatcaggagataaacagagcttgcttcttgtggttataatttatttatattacaagcaagcatcttttctgtgccttggcaaattgttaatatacctttctgagtttggattcacttccagcatcttatcctttgttaatttcaatgtcgtgaaatatctctgggagttcctttaatatgaaggttttttttgttggtgtcacttcctctgggacatcttcatccttctcattacagcctcgttcctcgtttaatccatgtgttccccttcactacacttccctggtagtatgtctaaagtctcttgaatggcagcagtgtcagcattcccacttattttttctataactccatttatgtttaattcaaatttctctctattattactcctttttgtttctttgctgcactttcacctttsttggccaattcccactttccattatccatttttgtacactgtcatgtgggtctattattgggagaaaaggaggcaatagagccacatgttttgcagtttgtgtgagcgctaagtaacagatgctcagtgaccaatcactgacacccttttgaagagtgatatgattgatcactcatcatgatgtggctgtgttataaatgtagggatgtgtggactgaagagttagaagccaagtgtgtacttgatgcagttatggytaatattaccgtggtaactgaaatttgaacgtgttgttgggagactggagctattttaacaaaagcatagtatcagtaattttgtgtataggaactgagcaaagcaaggactgcctgtaggtatttaaaagtgagcaataatgaaaataatacatagcaaaaattatgggatataactaaagccctacytagagggaaatgtatagccttaatgaatatataaggaaaaaaaagattttaaaataataagttggctttcacttaacatgtttgtgctaaaacagaagaaatccaaaaaagtaaaaggaaggaaatcttataataaaggtatgaggaaaaatcaagtaaatagaaaataaagagggtatcaacaaaagcaatatcatactataatgcttttcctgttatttaatcaaaattattctcatgtcaaatgtgtaaatagctaggaagcaaaatggaattatggtgttatttatttttcagccatatgcagttcagaagctcaaagcagttgcaggtgtgatgattactgcctctcacaaccgcaaggaagacaatggatacaaggtaaaccttggactcctgacctttgcttatcttatagttcatcttttttattcaaataatatgtgttgagtatgttttctatactggagagcagagctagacattgggaacagaaagttaaaaacactgaggctggtcctcaaagaatgtgtatccctaatggtatttattacttctcaatgtgtacaattacaaaaatgtcttctttagttcttttattcctaattgtccttgatttctctatcccttcctaaatccatcctctctaccgtttcataaagtcacattgcagcaagtacttgaaaaatgaatcggagttttcaacaacagaaccagaggaatggtaccttatcctcactctcctctctctctgactttctgccggagctgcttcttggccacaggattccacttgatgggtcagcctctgtgacagaaagcagaatggagaagggtgaaaagtggctctggaggggaaatagaagaatgcagcacagtattgaaccacgatttggggcttctgggtgggtcataagcctgtgttcttgtatttgtttttcttcttatgttggaggactgcagacataccgagctctgtcttactggcagaaagatttaaatgctaatgtaagattttggccctggtcagctaagtgaagaayagtgttaccattcatagggacagagaagaagcgtgattaattcagtttgggacatattaagttcaaggtgtttgggtcaaccaggtagcaatgtcctataggtagttggatatatagacttgtagctcargggagaaatgtggacttaagttatagagttgtgggtcaccacacatgttagagcatataagattatttggacatcctttacttgcatgagtagcccagagagagtatagagcagaaaggaaaaaggtcaagaatggatccctagggaatatcaactttaaaggaagggaagaagagaagctggagttaggagagtcttctacaaattctatgtctaaaatagaggttgaatatgtttacctctgcccatatcatatcctctaccatcaccattctaaaccattgttgtcttcttttgaaagactaaacgagattggtgtcataaaaaccaaagagataaaagagtgcaargaattataggtycactgtcaaagaaagccaagaacccacatctcttctctgatcatctgactacatagccaactgcctacttgatacattgggatgtctaacagacacctcaaaattagtgtctctagaacagagttcttgattcccccacaacatatacacctaagagtggtcctccttcagtctgttatctctgtaaattaacattaccacccacccaaacaaaaaccaaggatcattttttattacttcctttccctaacattttatctactaacgggttctacagatgcwatgtctaaaatagaagttgaatacacttacctctgcccatatcctctaccaatcatcattctaaaccattgttgtcttctatctgaacctaagcatcctaattggtctcttccctgcttccattgttctccctgcaatccattytccacaaagcagacagatgatctcttagaatatgaactttcctgcttaaagttcttcagtggcttcttattcttttgataaaacccaacccccttgccttggagcttataagtctgcataatctgcctcatgcctgtttyttcattccttcccttcctgcgctcactgcattccagtcataccactgctcccttctgttytccagctcctccaacatagcaagccctttcccacctytgagactttataattgttttgtcgtctgcttggattgctcttccccaaatcttgccaacttgcttatttttatcctttgggttcctactcagatagtgcttccttgaaggatcttccctggctaccttatctaaaatggcttccatcagtgactctttcttgccatcttatttctttcacagaacttatcgctgcttcttcctttttttttttttaagagatggggtctcactctgttgcccaggctggagtacagtggtatgatcactgtagcctcaaactcctgaactcaagggattcttttttttttttttttatactttaagttytagggtacatgtgcacaacgtgcaggtttgttacatatgtatacatgtgccatgttggtgtgctgcacccattaactcrtcatttacattgggtatatctccaaatgctttccctcccccatccccccaccccacaacaggccccggtgtgtgatgttccccttcctgtgtccaagtgttctcattgttcaattcccacctatgaatgagaacatgtggtgtttggttccttgtccttgagatagtttgctgagaatgatggtttccagcttcatccatgtccctacaaaggacatgagctcatcmttttttatggctgcatagtattccatggtgtatatgtgccacattttcttaatccagtctatcattgttggacatttggcttggttccaagtctttgctattgtgaatagtgccgcaataaacatacgtgtgcatgtgcctttatagcagcatgatttataatcctttgggtatatacccagtaatgggattgctgggtcaaatggtatttctagtcctagatccttgaggaatcgccacactgtcttccacaatggttgaactagtttacagtcccaccaacagtgtaaaagtgttcctatttctccacatgctctccagtacctgttgtttcctgactttttaatgatcgccattctaactggtgtgagatggtatctcattgtggttttgatttgcatttctctgatggccagtgatgatgagcattttttcatgtgtctgttggctgcataaatgtcttcttttgagaagtgtctgttcatatcctttgcccacttttcratggggttgtttttttcctgtaaatttgtttgagttatttgtagattctggatattagccctttgtcagatgagtaggttgcaaaaagtttctcccattctgtaggttgcctgttcactctgayggtagtttmttttgctgtgcagaagctctttagtttaattagatcccatttgtcaattttggcttttgttgccattgcttttggtgttttagacatgaagtccttgcccatgcctatgtcctgaatggtattgcctaggttttcttctgggatttttacggttttaggtctaacatttaagtctttaatccatcttgaattaatttttgtataaggtgtaaggaagggatccagtttcagctttctacatatggctagccagttttcccagcaccatttattaaatagggaatcmtttccccattkcttgtttttgtcaggtttgtcaaagatcagatggttgtagatgtgtggtattatttctgagrgctctgttctgttccattggtctatatttctgttttggtaccagtaccatgctgttttggttactgtagccttgtagtatagtttgaagtcaggtagtgtgatgcctccagctttgctcttttggcttaggattgacttggcaatgcaggctcttttttggttccatatgaactttaaagtagttytttccaattctgtgaagaaagtcattggtagcttgatggggatggcattgaatctataaattaccttgggtggtatggccattttcacaatattgattcttcctatccatgagcatggaatgttcttccatttgtttgtgtcctcttttatttcrttgagtagtggtttgtagttctccttgaagaggtccttcacatcacttgtaagttggattcctaggtattttattctctttgaagcaattgtgaatgggagttcactcatgatttggctctctgtttgtctgttattggtgtataagaatgcttgtgatttttccacattgattttgtatcctgagactttgctgaagttgcttatcagcttaaggagattttggctgagacgatggggttttctaaatatacaatcatgtcatgtgcaaacagggacaatttgacttcttcttttcctaactgaatacsctttatttctttctcctgcctgattgccctggccagaacttccaacactatgttgaataggagtggtgagagagagcatccctgtcttgtgccagttttcaaagggaatgcttccaggttttgcccattcagtatgatattggctgtgggtttgtcataaatagctcttattatttcgaaatacatcccattaatacctaatttattgagagtttttagcatgaagggctgttgaattttgtcaaaggccttttctgcatctattgagataatcatgtggtttttgtctttggttctgtttatgtgctggattacatttattgatttgcatatgtcgaaccagccttacatcccagggatgaagcccacttgatcatggtggataagctttttgatgtgctgctggattcggtttgccagtattttattgaggatttttgcattgatgtttatcaggaatatttgtctaaaattctcyttttttttgttgtgtctctgccaggctttggtatcagratgatgctggcctcatcaaatgagttagggaggattccctctttttctattgattggaatagtttcagaaggaatggtaccagctcctccttatacctccaatagaattcggctgtgaatccgtctggtcctggactttttttggttggtaggctattgattattgcctcaatttcagagcctgttattggtctattcagggattcagcttcttcttggtttagtcttgggagggtgtatgtgtccaggaatttatccatttcttctagtttatttgcatagaggtgtttatagtattctctgatggtagtttgtatttctgtgggattggtggtgatatcccctttatcattttttattgtgtccatttgattcttctctctttttttctttattagtcttgctagcggtctgtcagttttgttgatctggattcattaattttttgaagggttttctgtgtctctatctccttcagttcttctctgatcttagttatttcttgccttctgctagcttttgaatgtgtttgctcttgcttctctagttcttttaattgtgatgttagggtgtcaattttagatctttcctgctttctcttgtgggcatttagtgctataaatttccctctacacactgctttaaatgtgtcccagagattctggtatgttgtgtctttgttctcatttggtttcaaagaacatctttatttctgccttcatttcattatgtacccagtagtcattcaggagcaggttgttcagtttccatgtagttgagtggttttgagtgagtttcttaatcctgagttctagtttgattgcactgtggtctgagagacagttygttataatttctgttcttttayatttgctgaggagtgctttacttccaagtatgtggtcaattttggaacaagtgcratgtggtgctgagaagaatgtatattctgttgatttggggtggagagttctgtagatatctattaggtctgcttggtgcagagctgagttcaattcctggctatccttgttaactttctgtctcgttgatctgtctaatgttgacagtggggtgttaaagtctcccattattattgtgtgggaatctaagtctctttgtagatctctaaggattgcaacccctgcctttttttgttttccatttgcttggtagatcttcctccatccctttattttgagcctatgtgtgtatctgcacgtgagatgcgtctcctgaatacagcacactgatgggtcttgactctttatccaatttgccagtctgtgtcttttaattggagcatttagcccatttacatttaaggttaatattgttatgtgtgaatttgatcctgtcattatgatgttagctggttattttgctcgttagttgatgcagtttcttcctagcattaatagtctttacaatttgrcatgtttttgcagtggctggtaccggttgttcctttccatgtttagtgcttccttcaggagctcttgtagggcaggcctggtggtgacaaaacctctcagcatttgcttgtctgtaaaggattttattctttacttatgaagctcagtttgtctggatatgaaattctgggttgaaaattcttttttaaagaatgttgaatattggcccccactctcttctggcttgtagagtttctgccaagagatcagctgttagtctgatgggtttccctttgtgrgtaacccaacttttctctctggctgcccttaacattttttccttcatttcaagtttgatgaatctgacaattatgtgtcttggagttgctcttcttgaggagtatctttgtggcgttctgtgtatttcctgaatttgaatgttggcctgccttgctaggttggagaagttctcctggataatatcctgcagagtgttttccaatttggttccattctccctgtcactttcaggtataccaatcagatgtagatttggtcttgtcacatagtcccatatttcttggaggctttgttcatttctttttacccttttttctctaaacttctcttcttgcttcatttcattcatttgatcttccatcactgataccctttcttccagttgatcamatgggctactgaagcttgtgcattcgtcacgtagttctcatgacatggttttcagctccatcaggtcatttaaggacttctctaccctggttattctagttagccagtcgtctaatattttttcaaggtttttagcttctttttgttgggttcggacttcctcctttagcttggagaagtttgatcatctgaagccctcttctctcaactcgtcaaagtcattctccgtccagctttgttctgttgctggcaaggagccgtgttcctttgcagggggagaggtgttctgatttttagaattttcagcttttctgctctgttttttccccatctttgtggttttatctacctttggtctttgatgatggtgacgtacagatggggttttggtgtgaatgtcctttctgtttgttagttttccttataatagtcaggaccctcagctgcaggtctgttggagtttgctggaggtccactccagaccctgtttgcctgggtatcagcagtggaggctgcagaacagcgaatattgctgaacagcaaatgttcctgcctgattgttcctctagaagctttgtctcagaggggtacccggccgtgtgaggtgtcagtctgcccctactggggggtgcctcccagttgcrctactcgggggtcaggaacccacttgaggaggcagtctctccgttctcagatctcaaactccgtgctgggagaaccactactgtcttccaagctgtcagacagggacatttaagtctgcagaggtttctgccgccttttgtttggctatgccctgaccccagaggtggagtctacagaggcaggcaggcctccctgagcagtggtgggctccacccagttcgagcttcctggcctttgtttatctactcaagcctcagcaatggcgggcgcccctcccccggcctcactgcggccttgcagttctatctcagactgctgtgctaacaatgagcgaggctctgtgggcatgggaccctccgagccaggctcgggatataatctcctggtgtgcggtttgctaagaccattggaaaagcgcaatattagggtgggagttacccgattttccaggtgccaccccttccctttgccaggaaagggaattccatgaccccttgcgcttcctgggtgaggcgatgtgtcaccctgcttcgactcacactcgatgggctgcacccactgtcctgcccccactgtccaacgagccccagtgagatgaacccggtacctcagttggaaatgcagaaatcacccatcttctgcgtcggtcctgctgggagctgtagactggagctgttcctattcggccatcttggaaccgcctctgctatcctgaactcaaggaattctccagcctcagcctcttgagtagctggggctataggcatgtaccacttacctgccttttttttttccttcttacctccctccctccgtccctacctccctccctacctccctcccttccttccttccttctctttctctttctttcttttattttattttatttttattttttaagacaaggtcttgctctgtcaccaaggctggagtgcagtggcacaatcacagctcactgcagcytcaaccttccaggttcaagcaatcctcctgcctcagtctcccaaccacaggcatgagccatcatacccagctaatttttttatatttagtagagacagggtcttgctatgttgcccaggctgtaggtctagtttctttatgatgagttatcttatttatttgacccttctcacccccatcccctaaatgtaagttcgtaggtagagagacttagtctgccttgatattcattgctgttgaacatatttggcacatagtggaccctcaaagatattttttccttaatatgtaagcacaaggttaaaaagtgaaacagtagaaagtatctgtcccatctctgtcccctagtacagtttctcagaagcaaatactgtttccagttttcatttctgttcagggatagtccacacatatataaatatatacgtgtttgtcacttctccatctttttctccataaatggtagggtactatataatagtgttctgtgccttgctgatttcacacaacaatatgtcttacagactgtctttttctttctccctctcccttcccttcttctcattctatgtgtatgtatgtgtatatatatatatatatgtatgtacgtgtatatatacacacatatagatgtacatatatacacatacatgtgtatatatagtcaatatgtgtattttaaccttgtgcttgtatattaagaaaaaaatatgtatgtgtgtgtgtgtgtatgtgtatatatttgtatwtgtgacmttgtattttttggagaagctcagaagtagagagggctcctctgtcagagagtgcagtgagccgtgatcacaccmctgcactccagcctgggctacagagtgaaactctgtttcaaaaaagaaaaaaaaaagaaaatgaatgtagaagaatgtttattgtggcactgtttatacatagcagatgatcagaagcaaaggaaatgttcatcaataaaggattgattacataaattatgattcatctatatagatttttaaagatgaatgaagcagatatacatatgtatgaatggcatgaatatatacacatatgaatgatatgaatatatgcatgaatatatatgctttattcataaaattaatttcatctatgtattttttaatatgattactagaaaatttaaaattttatatatggcttgcatttgtggtgcacatacttcttttgggcactgctgatctataggatagatttttagaggtggaacttttgggtttttttgtttttgtttttgttttttgagatggagcctcactctgtcacccaagctggagtgcagtggcacgatctcagctcactgcaaccttcgcctcccaggttcaagcaattctcctgcctcagcctcctgggtagctgggactacaggcgtgcaccatcacgcctggctaatttttgtatttttagtagagacaggatttcgccatgttggccaggctggtcttgaacccctggcctcaagtgatcctcctgccttggcctcccagaatgctgggattacaggtgtcagccactgcacctggcgtagaggtgaaacttctggatcaaagggaatatgcaaagaaagtttgcattccctattcaaggtggtcataccatttaataacctcatcaacaacatatgacggcctttatcctgtatcttccatgattgtattatcaaagcttttaatctttgccaatcagatgggtggaaatgttatttttaatctgtacctgtcttatgagtgaggttgagcatcttttcatgtatttataagatatttgcgtttccctgagaagtctgttaaaggattttttttaacaaactttattttgtagagctgttttagattcacagcaaaattcagtggagggttcagagatttcccatatacccacttgtccccacatatgtgttaacaacatcccccattagagtggtacatatgatgagcctacattgacatgtcattatcacccaaagcccatagtttatgttagggttcattcttcatttgtacattctttgcattttgacaaatgaataatgacacgtatccaccattatagtatcatasagagtattttyactgcctccggaattctctgtgttctgcctattcatccattcctcctctttaacccctggcaaacactgatctttttactgtctccatagttttgccttttccagagtatcatattgttggaatatacagtatatagcctttttagattggcttctttcacgtagtaattccctccatgtcttttcatggctggatagctcatttcttttttagcacagaagaagaatattccatcgtctggaggtaccacagtttatttctccattcacctactgaagaacatcatagattcttccaagttttggcaattatgaataaagctgctataaatatttgtgtgcacatcttagtatggacataastcttcattcctttcagtaaataccaaggagtgtgagtgctgaatcatgtaacaagagtatgtttagttttgtaagaaactgccaaactgtctctaaagtggctataccattttaaatccctaccagcaataaatgagagctcctgttgctccacatccttgtcagcatttgctgttgtcagtgttctggattttggccattctaataggtgtgcagtagtatctcattgttgttttaatttccatttttctgatgacatatgatgtgaagcatcttttcatacacttctttaccatctgtgtattctttcggtgaagtgtctgttttgcttttttattgttgagttttaagaattctttatatattttggataacagtcctttttcagatacatctttcgcaaatatttctcccagtctggcatgtctttttattcacttggcagtgccttttgcagagcagaaaattttattttcattttaaatccagcttatcaattctttctttcatggatcatgcctttggtggtgtacctaagaagttattgccggctgggcacggtggctcacacctgtaatcccagcactttgggagaccaaggcgggtggattgcctgaggtcaggagtttgagaccagcctggttaacatggtgaaaccccatctctactaaaaatacaaaaaataaaataaaataaatcagctggacatggtggcaggcacctgtaatcctagctactcgggagtctgaggcaggagaatcgcttgaacctgggaggcggaggttgcagtgagccgagactgcaccattgcactccagcctgggcaacaagaccgaaactccatctgaaaaaaaaaaagtgattgccaaacccaagatcctctagacttcctctcatcatatcttctaggagttttatagttttgcatctgttaaactatttgctcattattcttttgctgtttcttattgatttatgggaactcttcatatgtaaaaagtagctcttggccatctgttttgcagacatttcctcccagtcttcttgactttatttatgatatttttccatgcatgatattatggtatttttcccatttgaaaacaaagttattttggcatttgtattggtatcaatattttatttatgtattaatttagagaggctcgatattttaataattgagtctccctattcaagaatagggtgtgtctttctattctttcaagacttcttttagattctttagtagcatcttaaatattttttccaagataattaaatcatttattgattatggatgacacacaagcttcattcctgtttataattttatctggtaacattattcaatttagatacattgcatagtatgtgtcaacaatcatttttataaccmataattccatgattttgcttgggtaatcccttttaatggtgaagttcaggtcacaatagtaattatcagttcagctacaccgaggtttctgaaaacaatgatttctctacccaagcaagttctgcataaactccmaatagaacctggcatcaccctgaaggaattctaacttcacactgttggggaaatttaccaagatggcttcagcatagactaactttacacagcacattaaaaaaaaaaaagacatttattcagcatcatgatcagactattacatttagcaatcaacagcatgggtgcaaaaaaaaaaatccatattaaaactctttgttggaatgcttkgcactttccacagaacaggaactaaaataacttgttacacaatttgtcacaaatacagtcctcgagttttttgcccatacacatgagtatttgtctaaaatatgtcttgtcgcagctaggccctgccaccactgtgcttggctgagttcacagatctgttgtaacctatagcttccctgtcacttctctggctctcctctcatgctaagctttgtttcctggcagtaattaaaatctgctgctgctgccatagctactgctgctattggaaccaccatagccaccttggtttcataattagtaaagtattggcctccaccaccataggggccagagcttctgcctccaaagtttcttcccttcatggatccaaattttttttttttttttttttttttttgagacggagtctcgctctgtcgcccaggctggagtgcagtggcgcgatctcggctcactgcaagctcygcctcccgggttcacgccattctcctgcctcagcctcccgagtagctgggactacaggcgmccgctaccacgcccggctaattttttgtatttttagtagagacggggtttgtcacattggccaggctgctgttgaactcctgacctcaggtgatccacccacctcagcctcccaaagtgctgggattacaggtgtgagccaccacgcctggctgagtccaaaatttgaagactgattgttgtaattgccaaaatcattgtagcttccaccacctccaaaattgcttccatcattaccaaatctgttatagccatccccactgccaccatatccaccaccaccatggctgccaccaaagccaccacaaccactgaagtttcctccacaaccaaagttgtccttcccaccaaaaccacctccacgaccaccaccaaagtttccagagccacttcgacctctttggctggatgaagcactagccatctcttcttgctttgacagggctttcctgacttcacagttgtggccattcacagtgtggtatttctgaatgacagtcttatccacagagtcatggtcatcaaaggttacaaagacaaagccccttttcctgccactgcctcggtcagtcatgattacagtcgcttcatttttttcccatactgttcaaaataatctcttaggtgatgttcttcagggtcttctttaatgctaccaacaaatagctttttcacagttaagtgggcacctggtgtttgagaattttctcttgaaacagctctctttggttccacaactcttccatccaccttgtgtggccctgcattcatggctgcatccacctcctccacagtggcatatgtgacaaacccaaagcccctggagcacttggtgtttgggtctttcattaccacacagttcgtgagcattcccattgctcaaaatggctcctcaggctctcatcggttgtttcaaagctcaaccctccaataaagagcttcctcagctgttcaggctctttaggagactctgacttagacatgacagcagggggaaggagactttaatgatgcttcctcagcagcatccacgggcagaaagcagtaagctgacctaaamgtttttttaaactagatttttcacacattttttaacatttattcctggacatattttgttgcatgaatttttatgttactatatcagataggaatgctttctggtgcagattaagtaaaaccaacaaaagtggcttaagctgataggagttcatttttctcacgtaacaaaatgtccagaggtaggtggccacaggcatggttctgtcactccatgatgtcaggctttgtgtctctgcagtttttctggccttaccctcaagcatggtcatcacatggtggttgctgtacctccaggcatcacatccacagacaaggcaaggagaaggggacagagagaaagaataggattttttttcttatgttttataaattttcacgtgagctttcaggacttatggagagaatcttttttgtggcttgaaatgtgggagcatccctccagaacagttttgtttsttttaaacattctgggttttcagcccccgcccggcagccaccccgtccgggaggtggggggcgcctctgcccggccgccccctctgggaggtggggggcccgtctgcccggccaccaccccatctgggaggtgtacccagcagctcatygagaacgggccatgatgrcgatggcggttttgtctagtggaagtgggggaartgtggggaaargaaagagaratcagattgttrctgtgtctgtgtagaaagaagtagacrtgggagactccattttgttctgtactaagaaaaattcttctgccttgggwtgctgtgaatctatggccttacccccagccccttgctctctgaaacatgtgctgtgtccactcagggttaaatggattaagggcggtgcaagatgtgctttgttaaacagatgcttgaaggcagcatgctccttaagagtcatcacyactccctaatctcaagtacccagggacacaaacactgcggaaggccgcagggtcctctgcctaggaaaaccagagacccttgttcacatgtttatctgctgaccttccctccactattgtcctatgaccctgccaaatccccctctccgagaaacacccaagaatgatcaataaatacttaaaaaaaaaaaatttacatttaaattatctgagagaaaagatcagtcgaaattttaacattcaaattgtaattaactaaattaagttgtccaaacactacaaagatattgtaaatctgctttctgttaggatattaaaatattcaatacaacacacacacamamaaaaaaacattctgggttttttgtttgttttaaaaattctgctagaacctcaaggatttcactgactgggggcagtttctgtgttaatttattgtttctcatcctaaaataactgaagtgcagaccttggatttgaaaatttttttaattacccagaactcaagaagagacatgcttcctcatgatctctgtaatagtgggcaggactttttctattctgcattttcactgagagtgaaatgcttcaaggatgccatttttattkgggggtctcagttccaactccctaccttgcacatgggcattacaatccaagaaccagataaatggacagttctcaaaccccaggtaaccacaatatcagtcccacaggcttatcattctgctttttaattatttttttcccactgcctggagtcgtccctttcctcttgtgaattatgctgtgcatttaagataatgttttttctgttttatgtagcattttgaggtgtttatagagaacaggtttttaggtcatctggttaaccatattctttgcatagagattagtacatagcacagattcaaatgtattcttctttccttcattcaggatgcaatagaggggatttgtgtcatatgcatggtagaagtcaccatagatattctctaaccttccaaatttgaaatcctataaattaatagaattacattttcatgcttttttggtaactgttcctaatgtcttattgatcaggctacttgacaaactgaaagctcattgaaatttatatggataattaacacattaattgttaataaactatatttggtatgatataaattctactttataatagaaakatgacttttttctatatcacataactactttataatgttaagttaaatagtatcaagttttagggaatagtctgtggtttcttggattatctttagtagatagttataggtttaagagtataattggatactatggcatatgcatattataatgttatcataataattagccctgcttgtattttactcatattgttattaaggtatacttctaaaagraaatcatatataatcatttgattgaagagtccctgtagagtcattactatctatatcttttaatatttattaaattagtcctcctatgttgacattttttatttgatcaatttgatatgctttatttttatttttatttttatttatttttttttttgagacagagtctcgctctgtagctcargctggagtgtggtggcgctatctcagctcactgcaagctccgcctccggggttcatgctattctcctgcctcagcctcccgagtagctgggactacaggcgcctgccaccacacccggctaattttttgtatttttagtagagacagggtttcaccacrttagccaggatggtctcgatctgctgacctcgtgatctgcccgcctcagcctcccaaagtgctgagattacaggcgtgagccaccgtgcctggcctcaatttgatatgctttttaataaagctgaagatctcaactatagacaagaaaagatctggcaagcattttaagtaattatggttatatttacttatcatctaggtttactgggaaactggtgctcagatcacatctcctcatgataaagaaattctaaaatgtatagaagaatgtgtggaaccctggaatggttcctggaatgataatttagtggataccagcccgctgaagagagaccctctgcaggacatttgcaggagatacatggaagatctgaaaaagatctgtttttacaggtatccaagtgagaatatcagataatactacttcagaataacgttaaagaatgaggagaataaaaagtgataaaaagtgttgtctatttattagattaaaattatagctaaatagtactcataagagtcaaagagtggaaataacccaagtaaccattaactaatgaatggataagtaaaatgtggtatatccatacaatgaaatattattcagcaataaaaataaatgaactactyacataccacaacatggataaaccttgaaaacatcatgctaagtgaaagaagccagtcacaaagaaccacatattgtatgattccatttatatgacatatgtagaataggcaaatctatagagacagaaatagattagaggtttcttgtggctggaaggaatgaaagggttgggggctggaagctataggttatagagttagtttctttctytctctctctctctctttctctctctctctctctctctttctttctttccttttttttgagacagagtctcgctcttgtcacccaggctgaagtgcagtggcacgatctgggcttactgcaacctccgcttcctgggttcaagcaattctcctgcctcagcctccgaagtagctgggactacaagcaaccactaccatgcctggctaatttttgtatttttagtagagacaaggtttcatgatgttggccaggctggtctcgaactcctgacctctggtgatccgcctgcctcagcctcccaaggtgctgggattacargtgtgagcyaccatgcccagcctagagtttctttcaggagtagtgagaatgttctaaaattgatcatagtcatggttgaacaactctatgaatatagcgaaagccattgaattgcacactttaaatgggtgaattatatggtatgtgaattatatctcaaaaaagctgttaaacaagttatacttaaatatatgtatttcctctatgttagatcagtacatttctcttaagagtttatttttccttaaccatttccatatttccataattatctctgtaactcttctgtaaatagctaacactattgctaggaagaatcctggctagctgagtgtatttttcctatcctacaaaataattttagctttttctcaactttattttaatttcaaaagtatacccatcaagctgtcaactgtttgcttctccgtctaaaataagtgacagtaatactagctaaatgctaccagctctaatcaatctaaaaagaatttgattccttttttatcctttctgtcttttcttatttacatttttgttttttaaagagtatatgggcaaaagcaaattaacaagtgaacctaactatttatcaagctgaaggcataattacacagagaagaattatttcaagtgactttacagttattgactatgtatttctagtgggatatgtcctaaggataaagaactacaaagaaacctcaaattttatttgatagctgtactgttagtggtaatattgatgattttacagatgtagatataaataaatatatagacatacacatatatatgataaaacaaatgggtaattatgttaatgtcactaggatctaagattttagtttaagagaagtgaatgtaaaatcaaataaaataattttaaaattataattttaaatttgaatttgaaatatgttttatttacctaaaataccaaaatactagttctgttactaaaaaggccaatgcctacccctaaagcccagactgtggtttctaaataccatttcctagtaaaaggaaccagggctcattggagaaattgattcttatcaaggagtggggcagaaaatgtactaaatgaggctgagataactttgttttccttgccatgaagcaggctagctttcaaagatactggggtcatatcaaaaagatctgggagccaacttgaagggactcccactgaccaaatattggatagttgggcatcaaaaagaataatcacctcaatgaattaaaacattaaacmtaaaaagcccatgactgttagtaatactaaaaaagcagtttattggtcacctttgggarttgctggactgaaaatcacacaggctgaaatttgataaattctaaattttccttctgaaaatcaataaatgtttgaaactttctcttaatttgttctgccttttctatatgaactgaattttagggctaatcaaatggttgatgaaggatcattatttttaaaagaaaaatacaataaatgcagaagaaataacagaattttcaaaatcactatgttgtgacctctaataaataatatatctaagtaattcttatcaagggctgctaagacccataggtgaaatgttgatgggaaatattttgatggaaggattaggctgacactggtgaatcttagtttgacagcattaaaagtagagtagaaattgtgtgcttccacctgtgagtcaatagaaaatacacagcacctattcttgcccaaagaattgaaactgaatctaatgttacctctaaatgcagttgcctatttacagaaaaaataggatagaagagcatgttaataccaaaaggatgcagtctacatactggagatacaggaaattctacaggacaaatgggccagtttcttcaataaatgacatttgggttggggaaggaagggaggaacatttacagattaaaagagacttgagaggcatagcagtcaaattatatggaacctcgttcaggtcctgcttcaagtaaaacaactgttaaaagtatttttgagacacttggggaaaatttgaacacagatacggtattagaggaaagaaattattgttgattttgttagatgtaatgatggtaatatggttatgtttctaaatactaaagcattttcatgtaaagtaatatatcttgaataaatgagactagattgacagacaatggaaacatattgaagtgaggtaatgggtatatggtgttagatattctgtcttcctatgcatatgtttgaaaattgtcataactttatttttattatttatcttataataaattgtattttttatggggaatagttagtaaatggtaggttaggatgtacaaagttttgctgtggaaaagaccaaagaaacagagactagatgctaatggaaatgatgccggcgagagagaattatccatgtactaaagttctcaagtgagaattgatggggaccagagcagaagtagaggggttgacctttgatacaaagaacacctcctcgttattatcagatggaagaaggaaaaaatatgggttgtcggtttggtgtgggacgattaggaagttcccatcaaatggctctgtgtctgagtgatgtatgagrtgaagggggaggaaaggaataaggagagaagagaaggtactaattaagtcaccatcttggagagtaaaaaagtaagctttytgggtaacaaagtaggattgcctggcagcattgggtrtccattcagagtgaagctgttcaatccttttgtgagatttattctagcaatattcaactattttggtgcaagcctggaaaaggaacacatttgggttcaacaagatttggggtattggagggtcaaagtagccagactgacatataagaaggtgagtgtaattaggtactttgcaatctaaactggaagtgaagaaacgaggggtctactggcaagcgagaaagaccagttaggaagtgtttgtgatggtctagtgagagataatatttacttagatgatacaagcttagcttgttcagggtattggcacagcatatggaaggcagctgtccaggtcaggaagttgagccacaaagggagaatgctgttgaattaaaactcttgatctttaagttagtactcttgatttgtttgtttgaatatcttagacctctgctgaaggcttaaatcacatttaatcacattttcaaatcagaatttgattgtttttaattatatcaaaggtaagaggttttgtaatcatgatcttatgttgattttcctttacagggagttaaactcgaagaccaccttgaaatttgtgcacacatcttttcatggggtcggacatgactatgtgcagttggcttttaaagtgtttggttttaagcctccaattccagtaccagaacaaaaagatcctgatccagacttttctaccgttaaatgtccaaatcctgaagaaggagaatctgtgctggtatttttttaaatatttaaattattattagtttattaaaccatcagaatagatagaactcattgacaattcaaagattacttacaaaagcagaaaggactgtagtttacatcttttaattgtattggagtaataataggctgtgttttgtttgaaatgtctatggtgggtgtccctacttttggcttcttgttttaaacgtagctgaattctatgccttctaaaattcctatcactaacattgtgcctacatacaggaacrttaacattgaacttaggttcttcagtacaatccagctttttgggtcactgtttcaggaactttccttgagactggcagagaaagaaaatgcccgggtagtgctagccacagatcctgatgcagacagactggcagcagcagaacttcaggagaagtatgtagaatctgttatttgattaaaagcttgaactttgaaaagcaatgtattttaagtcttacaggctcattgaaaataatgaaaagataagaaaagaacataaatttcctgtaaatccattatcccraaataaccacctaagttgatactttgataattctttcctgtcttttaaattgaaatatttaaagatgtatttgtttttattaaattatgatcatagttttatatcttgattattttccacattaattgtacaaaatgcttcaaaaactgcttacagtgtaatggttaagtataatgcttacagtgtaagcattttcccctgactttatacattttttgaaaatattaatttttacaaagacataatatcccaacagatcgctttatgatgtagttatttcctaacctttttktttgtttgtttgcttttttttttttttttttttttttttggagacatagtttcgctcttgttgcttaggctggagtggagtgcaatggtgctatcttggctcactgcagcctctgcctcccaggttcaagctattctcctgcctcagcctcctaagtagctgggactacaggcatgtgccaccatgcctggctaattttgtatttttagtagagacagggttttgccatgttggtcaggctggtctcgaactcctgacctcaggtgatcctcccaccttggccccccaaagtgctgcgattacaggcatgagccacctatttcctaatcttagtcctctgggctgctatgtatttttaccattataatgtgacaaatgtccttaaatagaaaggcttaattatttatcataattttttctctcattaagtaaaagaataaatgtaatgatataataattttccaaaagacgttgtaccattcctaccgtaaaatcacccctggtcagttagaaaagaagtagtaataaatgttttctcaaaaatcccatatgatagtttttgatktttcctaactgaaggatggtaatttttaggccttggagtcaagaagttttaatgagaagaaaggtcttgacattgtattttccttctctctacagtggttgttggaaagttttcacagggaatgagttggcagctttgtttggatggtggatgtttgattgctggaagaaaaataaatcaagaaatgctgatgtgaagaacgtttatatgttagccaccacagtctcttctaaaattctgaaggcaattgcacttaaagaaggatttcattttgaagtaagaatcaataatatctgtgtgctactttttaaaacctatttctgtatgttaaaracatctccccaccaagactgactttcattgatttcatttgtaattcccttatttttctaattctgttaacacttgttcagtctcttttgataatttagacaccttgagccaaaattcatccagtaccgtatatgaatttctgggactaagatgagatattctttaaaaattacattaatacttattattctgtacaacaaatatctggttttcagacagggaaaatatagctcctggtgaccccatcagtaactcagacttctctccaaaaagttgtaggtgtcatcaaccccttgttcaggctcttcaagcatggtcttaaggaacttcaagtagtcttctaaattgcatagtaaacccaatgatcctacatccaaaaaaacaagcagtggctctctctcagcccagatcattaaccttatgaccttaagacccttaagctgaccatttttgcagccatgttaactaaattgctttttctctgccatctttgccaaatatcagtgaaaatgtccctggacatttttcttgagccatagtcaggctacaggtcttaacactaattkactgagtaaaagaaaattgtacctggctttatgaaatagagctttcaaccttatgctttctaaaacacaaatagcaaaatagaagrtactgaaagttgattcacacctaagattctgatgttttcctagtttatgtctatagcaagaagaagtataatgggcacaaaagagaaagaagaacaattctaaagaccactattataattttatttgcttgtttttgttgtagcagggaggtttttgactttttaatttttaytttgtagtaaggaggtagaaaggtgaattaggaaacaagttagtaatggtgagctttagtattagggtgtatcacatactctttctgttgactctgaaactctttctgtgtctttaaagtgaacagtagctcattagatgaaaagtcctcaaatctaattatttaaagaagtagttagtaactgtcttggtggttttattaatagttaggacacagtgttatgagaaggtacacttggttcaagcttatgttatgctaatattaaaagtgcatcactaaaaagcttcatgacctttcattgattactcagggagagtaaatccaccaactttcataggcactcttatattagtggttgtaatatagcttaaaggacagtttctgagaagcagaaacttgaaattgaatcttgactccatctcttatatgcagtataattttgggcagattgacttatctttcaaggctgtgtttcagcgacagcgtttttgagcattaaaaaaagataatggggccagacgtggtggctcacgcctgtaatcccagcactttgggaggctgaggcaggtggatcacaaggtcaggagttcaagaccagcctgaccaacatggtgaaaccccgtctctactaaaaatacaaaaattagctgggcgtggtggcacacctgtaatcctagctacttaggaggctgagacaggagaattgcttgaacctgggagacggaggttgcagtgagctgaaattgcgccactgcactccagcctgggtgacagagcgagactccgtctcaaaaaaaaaaaaaaaaaaaaaaaaaaagataatgtaaagcacctggttcagtccttaatagtaggtgattatactgattatactgtatgtgcttattcatgttactttgkgactacatgaagcaccacttataaatgctggtttatatttggtgtaaatcacctagtactataatctgtaaatagtaggtcattagtagtagcagtgtgtgtatttatggcccttcattactatatgtctgctactgtataaatctttgtggactgaagactatagtaaggatcattatatgaacgttgtgtgcatgtagtggcaratttttctctaataggtatttgtgagacagtcacttaactagagtggcctcctctgcatttcaggaaacattaccaggttttaaatggattggaagtaggataatagacctcctggaaaatgggaaagaagtcctttttgcatttgaagagtctattggtatgtagtaaatattaaaatmttcaaaatttgattgataatttttaaaatgtaattctgtaggaggagttttttgtgttctggtttcatattttgagttgtaaaaactacagagaatgagaaatatgtagatacatttcttatcagaaaaaaaaaagaacgaaagtgtcccctaaatacactcagtattgatgagtttcatctattactaggcttttaaatttcctggtccttctgaagaaatgtaaaactattgaaattatagccttaagttttcctcttttctagtgatggttttcaatcctcaggttttctctgtggaacttcagttttggataaagatggggtgagtgcagctgttgtggttgctgagatggcatcttacctggaaaccatgaatataacattgaaacagcaactggttaaggtttatgaaaagtaagttctactattatgaatttcacatgctagatttttcttttattgtcctacccttagttttctaaatttgtttctgaagaatagttgatccttttttaaaaagtattaaaattatgtgaattaaggactgccactttgtataaaataccatagtaggctgatcttccttaatatatgcttttttaaagagttatctgaaatctaattttagcactttgaatctttgcacagatatggttatcatatttcaaaaacttcctatttcttgtgttatgaaccacctaccatcaaaagtatatttgaaaggcttcgtaattttgattctccaaaagaatatccmaaattttgtggaacatttgctatattgcatgtacgggacrttaccactggatatgacagtagccagcctaataagaaatcagtaagtacctttttttttttccaaacaatttagaaaatttcatggctcatgtcaccaaaaagtccagaggcaggacagatttcacatgagattcaatccagtttcctcatgtttaccagtttattataaaggtgacaattctggaacagccagatggaagagatgtatagggcaatgtactaggggtggggttggggcctggagcctcccagcaagtccacgtgtttaccaagctggaagctcctgtaaatacttaaaaaaaaagtttttaacagtttattataattcatactgaaataggagatcagcaggacttgttttccaagcactggtcatgacctcactgatcaaaacaggatctggtccaaacaggatgcagtaaagaaaccagccaaaatcagctaaaaccaagatggcaacaaaagcaacctctagttcccctcactgctcattatatgctaattataatacattagcatgctaaaagacactcccaccaacaccatgacagcttacagatgtcatggcaacacccagaagttaccttatgtggtttaaacgtggaggaacccttggttccacgaactcctcacactttttctagaaaatttgtgaataacttgcccttatttagcwtataattaaggagaagctataatatagctagccagcaatccatggtactactctgcctatgaagcagccattttcctgtactttgtggctctgataaaattgctttcctttttttttttttttttttttccttgagacagtgtctcgctctgtctaccaggctggagtgcagtggcatgatctcagcttactgcaacctctgcctcccaggttcaactgattctcctgcctcagcctcctgagtagctggggctacagaagcatgtcaccacgcctgactaatttttrtatttttagtagagacagagtttcaccatgttggccaggctggtcttgaactcctgaccccaagtgatctgcccacctcggcctcccaaaatgctaggattacaggcatgagccaccacgcccagcagttgctttccttttactttactctgttgattcattcttgaattctttcctgtgtgaagtcaagaaccctcctgggctgagccccagtttgggggttcacctgcatcaatactataataaaatggtgaaacttcaggcctgtgagtttccttaagactagaacccattgttttgctccagagcatttttcagtctgctaacttatctctctgactttgatcctatccttatcacttcccaaataatcatgtatactaccctcagggtaagatgtgtggaatggaggtgggggcagagagagagaaagaaaaagagaaaatgggcaaggatgctagataatgttgaaaataactgtaaaagcctataatttcaaagccatacatctttctaattttaacttccttttccaaccttattccctatacctccagccaaatagaacagcttacttacttacctacatgtatacattttttttaaatttctgcatttttggtccagttgtttccttagtttacccatttttccaatttctacaggcccatacctcagctactataagacttaaggcaaatgtcacctgttccacgcgacctctargcctcataattagacaccttcctcttcaggtttcattacatagtgtgccttcctcctattactgttttatgtcatcattgtgttgtacatggcatgttcctttctgatgtacttttttgcctcaccaagttgctgcctatgttgtggctgctcaacaaatacttaaatgccatagatgctgattatattcattttgttattgttgttgtgatgattattagcccaaatttccatttgtaatgttctgatgtggtctcaagattctggggacataatgtattttggaaaatctgtagtttattgtgtagaatagtacccatattccatttttgcatatttatccaatcaacaaatattagttcctggtgttgatatcctgtgtatgagtatatatgtgtctacttttctatctttgtaaattgctggaagagaagaatcacattttgcttctttttatttctctagtttgctgtgctcaagtagcctatggtataatgcttttctccctcttaattctcgttaaagtgtataatattcattattcagggtgctttttcatctattctcttctggttcttacaacaagtttgtaaggtaggtagcatagatgttgttatccccaaggttgcatagtaagtgtcaaagccttcctgaattctctcttttccatgtttcagattaattgatgttcatctgtgtatattcacttatcagagtccttctgtgctgcaggcacaggtacactaggaatatagcaatgacaaaaacactgcactcaagaaaaagtmtagtggggaaattgacaagtaaatagcaatttacaaaatgataagtgctaccaggggaggcatgcataggatgtcatggaagagactttgggggcttatgcaagactttctagagaactgttctgaactgagttcccaagtatgattaggagttggccagatgcaggaggagcagagggtgtttcaggcaaagggaacagtaagtacaaggtccagagatgaaaaagcatattctctttcagagaaccacaggtagttgtctataactggagtatgaggtgagaagaatggcctgcatgatgagtgggttttgaggggcaaacttccaggcaggaagatcagttagtacactgtgtcagcagtctagatgaggtgtgatggtcacctgaattcaatataggagcagtgatggaaagaactggataaagttgagttaaataaagtatagaaaggacttgctactttatgggctgtgggtgaaaaagaagggaagatctctgtgttaagtcactggtatatggtaatgtactgaccaagagaagggtctcaaggacaggactcatggctcaggacagctgaggaaaggtaccagtgtcaacccctctggcctagtacaaccctcacagtcccctcgagatgcctcaacagacggatgtgtggactagcaagagtaccagtgttaatccatatatttagtgtcagtaaaacatcacttctttttttaatttttataaaaaatagagttctttctgcaccccagtacatgcaggatgtgtgcactcctctttggagacgattgataaackgcaaaaatgcttcgcaaatatagaggcagtttggactttggaacttggcttcygcttcttgttctaccacttagttgattgtcttgaaygggttgtttactctctttgagcctcgtctgtaaaatggcggtaacacttactttgcaggattattgttgaggcccagagatcatgcattgaggtatataaccccatgccttaactattcagtaaatggtatgtttatgaattattacatataggtaatcttcatttgtattttataattcttttaaaatatgttttaaattttcaattgtggttaaaaaaacacataacaaaaattaactatcttaaccatttttaagtgtatagttcggtagtgttaagtatatttatattgttgtgcgacagagctctagaactttttcatcttgctaaactgaaactctctatcctttaagcaataactccctataccccctgccttggcaactgccattctaatttctatttctgtaaatttgacgactttagatacctcatataagtggactatattttacaattcttgaaaatgaaagaaaatgaaaaagatgccaagtataattaagctgttgttgccattttgcataggtgctgcctgtgagtaaaaacagccaaatgattacatttacttttcaaaatggctgtgttgctacccttcggacaagyggaacagaaccaaagataaagtattatgcagagatgtgtgcgtcacctgaccagaggtaagaattgatttttttaagatatacatacaaaagctttattgaaatataattcacataccatacagctcacgcacttaaaatgtacaattcagtggcttttagtatgttcaaagttgtgcatccatcactgtaatcaattttagaacattttcatcacccccaaaagcccgtagccatgagaaatcacttcccatttccctcctttacggccctcagcaaccccaatctactgtctttctctatagatttgcttcttttctgggcatttcatataaatggaatcatacaatatgtgggcctttgtgactgccgtcttttacttagtataatggtttctaggttccaccatgattcagttgtagcatgaatttattcctttttttaaagttttgttttttatggcccaacaatattccattgcatggctatgccatgctttttaatccattgatcatttgatggacattcagattatttgcactctttggctgttttgaatactgttatgaacatttacatacaggtttttgtgtgaatgtatgttttcatttctcttaggtatatacctaggagtgaactgctgggtcatatggtagctctgtgtttaaccttttgaggaactgccagaccattttttaaagcagctacatcatttgggaattgaattttaaaattgtattgaatttctattcttggaaagattctctgagctttaagtattatgtgattaacataaggaaattatcatcaaataatttgtttattgccaaatatccattttctatgtctaatatgacttgacataatctgttcagttcatttccttttaagaggatgaattgtgactaagtgaatttcataaacatattcaaaggctacttaaatgtattaaaagtactgtctcctataatattgtaattgctcaatatatatttgggaaggagattttttagaattgctttcagagtccaaccaagctatactattttgtatttccccaaatctttgcatttaaggatagatttcatttcctttgsgggggataaagagcccccgaagtcattcaaagtagaatctaaagtaaaccaaattgggtaatgctacatctkgttgaaaatgaaggaagattattaaagtaataagaactgatttgttgtgtagcttttaaaatgactgtaaaggcagtttaaaagaggcttgcctcgaaatgttctgggcaacggcagcacctcagtgatgactttcaagggccttcttttaagtgcacatttatttttttaaacatcacgttattttagtcacacctccttctgctacctgaaagatatatcattccataacatctgtactgaatatttttcaaagtatttcaggaagccattttctcctaacacctggtatttgtgttcaaagccattagaacctcattctcctgacccaggagaattctttagatacaccatcactcctctgtttatcatgtgccaaggaactcctattaatgcagttcaccttcagtttgtgatagcagtgttttctttgtgtgtaatttttttttttggtcttgttttgttttaaccaagtgaatttctctttkgtttaccaattgtttaatgactccatcaggacctcttaaaaaatcacactaatttaaataaattttaagcctatgaaaataaataattccaaaactcttcatcttttcctcagtgacactgctttactggaggaagaactgaagaaactcattgatgctctgatagagawttttcttcagcctagtaagaatggactgatctggcgttctgtttaggggtacaccaataygtcatgacactgtgtgggcatatggaacagagcmaccgagaactgcatacattgaaccttgtgttagcattctctctctatctcatctggccgagtatctttttccttttattttctttctttttggtcaactggctagactaaacmaagtataagtttgaaatgaaatggtctagagggaaatgattcaaattttttcataattcaaacaaaagttattacactaaaagtattatagtaacgtattgtccttccgttaacagaaacatcacmattcaaaagtgagttttcttattatagtgtgattaagcctagttctgtatctcgtaattgtgtatagcatggtaaaagaaaaaaaaaaagacaggtaaatgttatataattgtagggttagttaaggaaattagtccataaaattggcaagaaaatggtactttccttgattgttatgaaaaastgtcattgtgacatcacaggtattaatttacaaattagagtatttgaaataggatatttagcatttctgtagtttagaacagatgttacagtgtgtggttttggcatgtctgtttcaggtgcccttggtgcagtataaatttactgtatgtatttaaaattctgatgtttactgaacataaaacaatagtggcaacactcctattggctttgttcttatcaaatttctcagtgccttctcagggtctggtrtgaacagaaaaaacagtgttcctgcatttaccataatttaatcagtcaatttgcagatagctaaggaaaatcttccaaaatctgtaggtgcttcctctatatcaagtgagtttgctgattttaaaatcttaggaatataaataaagatcttaataaaagcaagcttaatgtagttaaggatcttcatattagaattgtgtcatttatcaaaccttttattacagaaaaaaatctgaactgagaaaggagctctgaatttatttgacagtctaacttttgaattacatttttgtaagtagatttattcttttattttatgaagtaatgttaattttactaagaataaaacatccaaattttaagtattatgaaatactaaaactacatgttttaaaacagaggtccagtttattctaacatcttgctgacttctgtagaatttctgattgcatgactattatttatcttcttttagtgtagaaaataattttttacaaaaagtcacttttgggctgggcgcagtggctcacgcctgtaatcccagcactttgggaggctgaggcaggtggatcacaatgtcaggagtttgagactagcctggccaatatggtgaaaccctgtctctactaaaaatacaaaaattagccgggtgtggtggtgggcacctgtagtcccagctactcgggaggctgaggcaggagaattgcttgaacctaggaggctgagattgcagtgagccgaaatcacgccactacactccagcctgggcaacagagggagactccatctcaaaaaaaaaaaaagtcacttttggctaatcatgcagtcttctgaaaaggtttaatagagaaatgctgtttaggctgggcttggtggctcacatctgtaataccagcgctttgggaggctgaggcaggaggattgyttgaggccaggagtttaagttacagaactatgatcacactgccgcactgaagcctggatgacagagtgagaccttatctcaaaaaaaaaaaaaaaaaragagagagagagaaaaagaaatgctgtgtttaatcttcttaaaatgtatcttgtcctacatagttctcagaatacatatggggtatagttaggagataacaataacaagacctaaacaaattgcttatgggagatagcactgtaattagagaatttatttcatataaaataataatataaagtttgaactgattagaatgttccttaaaycatggtttcgtttgttgcagctgtcagctaacatttggttgagctcatataatccaaacctaattgtccaactattgtattgccactattgttaatttgttccttccttactttcttattgttggatcttatatgactgtatgactgtagataatagacagctagctaaatgtagagcaccatttttctcaatgagtttgttttcaaaggctttgcactggagaagatatgtgtagaatttttgttttatttttaaaatgtgtaaaacatcttttgttttatatgcttttaagaatgtagattgtaatttaggaaatggcatatattctgcaaagtggtataatgttgtatatatgaaaaacaggtatatttggtttagttctgtgtttcagtgactgataaacaaaaatgaagctaaaatgaatcaacggctcattcatagttactaaagccatgtcatgactgtcattctattatgaagaaaacagttttatttgagtgctttaatataatgcaacatttaagtcatcttaaggtgaaaagttattgaagtgttcttctctcaagttaacaaaattttacaaatgttcctgaagtgtatcgattgagggaattattttattctagcctgtcatgagtctgtctgagcatgatacttaacatgaacttgatgtagtaggtgcacatttgcctaacaggataaattcagtgatagcccaagctggtcaggagagacagaagtgctggctaggaggtctcagcctcrsgcactacaatgtttatctttttctttttgaacaatattgtgaaaatgattgcattctcattgagcatgaaagtcaaaactggaattttctaaagctttggagaaaaggagagaattagtagggcaagatcaaagcatacattggaaataaacagtagaaataagcaaacaatataaagagacacgggaaatgcttctcgtgaagggcaaatgtaacaccataacagtagggaataaactgtgtcccacctgtttacttgtgtttatttgttgttatgatgagtatgcacctaccattttcctttattgtgatcactaaaatgaggccaaggtttaggaggtgagaaaaagtatcccttttacggattcagttcctgctaggatgttgtatcagaatcatgtgagaactcaggaagagrtagagcagaaataaaaaggaagaaaatgtagattagaaaataagacttctgagaaaaagttcaaggaataaagattgtttgactctggagaggagaaagctgttgagatagtttgctaagtttgctaataaagctttattgagtcttttattgaagggttcaaagtaagaaatactatgccatagtgttctccatctctagtgaagacagaaccagagggaataaggatcttttttttaaagacagcatggaaagtttaagatttaggaacttcttgagaaatcttcataatatcttctattcaaaatcttttttttatttttaagggaataaaaattttaaaaattaagagatatacagatgactttttaagggtccttctttccagcacattttttttaaaaactcaggttagaacaaaaatgtcataaagggcactaaaagtaacatttgggtttcactccatatctagaagaatttagctcacaaaacaatttttgtgtgttttgagtaactgatgcataagtgcaatgaataattttcctgcttcactgttatttttaatttaacctggcaaattaagtgagacttgaacaaaattttgttcatcttgaagaatgtatagtggcttaggttatttgaggttttcgttttgaatatatatgttgttattttgatgtagatacgttagcagatggagaggttctaagagattggatactttggaatgtctttatataggaaatagacctcccatttcttaagcaagttgcttctggaattgatgcaacagggatattagctgtagtttaatggataagttgttctatgagctgctgctatcagtatttttttccacattttccattgatatttgtgatgcttgaaaaatccaaacttcacttggatacatttaattttatgcctttttctctctacctcccacttttcctaggcacccttgcacattttgttactgtgaaggactattgccctgttacctcactgataagaaatctcaactgtattcattcagaatgctttaagcttagtcataaactacatttgcctatggacctttggttattttgttaatgttgtcattatatttaagacttattgtaggaagtaattttaaatctatttcataacctgttttgatctgtctgcatactgctatatgttaatttattacggccttttacaattcacttgtcatctgagattgttctagaaactgatgaggaaagagtcgtactaaccaaaatgaatgggcaattgacataacattctatttcaggtttccttgtacttggggagccaaagcacaagatctaaggaaatcttattcacatttgtccctcagagcatcttaccctaagccatagaggtataaatagtaagatgagaattgctcattgtctgactccttgcacagcatgaatttaattctagttggaaacaaagttagtgttgactactggttaccttaaagtattcaccatactatatatttattagaccatctttcctctttgtttattcaagactatgtacttataaaagagaacctataagaatgtgtagagtgaccaaatagggacaaagtgacatacctagagtttgctgctcaaatttttccactagcgtaaccctaaagcagaggggcatgatgaagggggaaggggttctgagagcaaaatcagaatcagcctaccactgacatgaagtgtgttctgtctttaaaatgtaagtgaattttgcattctttataataaaacttttaatataaaaatgatatgtttaatctttactgaaacttatgccaccacaaaggagcaccatgttcatcacgtggctgctcagttttctcccccagtgccctcacccccagtggaggcaagtccttgagctacacacactggctgtagtgcaagatatataaacataggccgggctcggtggctcatgcctgtaatcctagcactttgggaggccgaagcaggtggatcatctgaggtcgggagattgagactagcctgaccgacatggagaaaccctgtgtccactaaaaatacaaaattagccgggtgtggtggcacatgcctgtaatcccagctactcgggaggctgaggcaggagaatcacttgaacccaggaggtggaggttgtggtgagccaagatcgcgccgttgcactccagcctgggcaacaagagtgaaactccatctcaaaaaaaaaaaaaaaagatatataaacatagaacatatccagactatttcctgcccttggaatctgaccttcagaaggattaatgccaaactaaactgacctgaaacagttttgttactattggcattccttgactaaaaaggaccacctgatgctcagtcccgagagtaggaatcgtggtttattatttttcatatccataccacctagttcagtacctgttatagagtgtttaattgctgatactaggaattaagggattttttaaaagtagcaaatagtttaaggaacaatcaaaaaatgaattttctaattcagttttttcaatgaagtcccatcactgaactttataatgtaatgtttattaagcagacatccccttaaatactcagtttctttggagagagcaaagcatatctctctgtggaaattatatataatgcctggtattttacactcaaagcaaggtgttggccaggaaggtaaagaaatggtgtctatgtagacttaatatcactagtctaagtgtcattttgagcctagtagcactaccttccaagtgagtcacaacaaatttgatcctatttggtatgtttttgtccactgttatgattcatcatgtatcttacaagagccactcaagcaagactctgcttctatgtatggtgaggccttgttgttctaggctagaataaactctttgtatgcctcattgaatatgccaggtaaaatttatgcagtcaagaatgaattatttttctgactaaagtgtgtagcagtagttcaaaattgtgcccttgttttaacagtttctgtcaacatcttytcatttttccctacaaaaacaccagggtgtattataagtactgcctgtgagaatttgcactttatgtatttgtgtgtggatttcttgtggttttagccaaatgaagtgttatcagtaataaacaggtctcttcataggcatgagtttctgkgtaatttttatttgagatactgtgtagttcataaagcttgctatctaaacaggaaatactcttgaaatacacacatcacataccctagaatccactttgcatctaaatgaatattctggcttagtactcaggaaatatttcttgattggtttatcagaagtcccagatgtgagaactaacattaacattcttatttttcttttctttttctctccttaagctgatctaatttgtttgcccatgttagcgccagctactataataagacaaaagtttaaagtttggaaatctctcacggtaataaccgtagatctatgcttcaatactgatgaaggactgagtttccaagggttcttatgaatctgtggtcctggtctctgttgcctgcctttcccagatcaggctcaaagggaagatgactgaaaggaatgttctacgaggtccttttgtcagcttctaaatggaatattctgagaaccatgccgaccccgtccttaaccactttccctagtttattgttctttatagcacataaacaaatgaacaaatcaatttaagtagtagtattatctgtcttcatgagcatagctttttcactactttaccactgcctggaacagtgtatggccctcagtaggtacccaataaatgtttgtcagatgaaagaacctatgtcatgtttcttcttgaagaagaaaaacaccaaatccttgattctgcatatgcgcagagttgcacgagaaatatgcagtggcgataccacctgttttagagacatgttgctgctgttgggtcatctctgctcacaacatacctgctgaaatctcaagctccacattttcttcctgcttttcctgagtggccgtatatctccctggtttgaaacctccaaatcatcttcgatttctcctgccactgggtatgtgctatttgatgcattctttaaatgtaacagtctctgaaagtaaagggcaaggccattgacttgagacccacgtaaagagaccaagcagctaacacaacctaaaataatagggttttatttatttatttatttattataactgaatgaaaaagatttaattttataaaattgacaatgttcaccaaattatatctattacacttttttttttttttcttagtatttattgatcattcttgggtgtttctcggagagggggatttggcagggtcataggacaatagtggagggaaggtcagcagataaacatgtgaacaagggtctctggttttcctaggcagaggaccctgcagccttccgcagtgtttgtgtccctgggtacttgagattagggagtggtgatgactcttaaggagcatgctgccttcaagcatctgtttaacaaagcacatcttgcaccgcccttaatccatttaaccctgagtggacacagcacatgtttcagagagcacggggttgagggtaagtttatagattcacagcaacccaaggcagaagaatttttcttagtacagagcaaaatggagtctcccatgtctacttctttctacacagacacagtaacaatctgatctctctttcttttccccacatttcccccttttctactcgacaaaaccgccatcgtcatcatggcccgttctcgatgagctgttgggtacacctcccagacggggtggcggccgggcagaggggctcctcacttcccagacggggcggctgggcagaggcgccccccacctcccggacggggcggcagccgggcgggggctgccccccacttccccaatggggcggccgggcagagacgctcctcacctcccagacggggtggcggtcaggcagagacactcctcagatcccagacaggttcacggcctggccgaggcactcctcacatctcaggcgatgggcagccggccagagacgctcctcacttcctagatgggatggcggccaggaagaggcgctcctcacttcccagactgggcggccaggcagagggtctcctcacatcccagagacgggcagccaggcagagacgctcctcacttcccagactgggtggcggcagggcagaggctgcaatctcggcactttgggaggccaaggcaggcggctgggagatggatgttgtagcaagccgagatcacgccactgcactccagcctgggcaacattgagcactgagtaagcgagactccgtctgcaatcccggcacctcgggaggcccaggcgggcagatcactcgcggtcaggagctggataccagcccggccaacaccgcgaaaccccgtctccaccaaaaaatacaaaaaccagtcaggcgtggcggcgcacgcctgcaatcccaggcactcggcaggctgaggcgggagaatcaggcagggaggttgcagtgagccgagatggcggcagtacagtccagcctaggctgggcctcagagggagaccgtggaaagtgggagacgggagagggagagggagagggagcagggttttatttttgttctcactaaaggagaagagttggtatgtatataaatggaaacgttttggaggggggattataataaaaatttggtattcgctatccttcctctctatcttccctaaaccaacacttcccctcatttctgttagtgctgtgaccattctcctgtttatttttatttccctctctttacctccatttctgatcattaagtggtccgaccttgcacataatttgctttagattaagtctttgacctttatccctctgcttcattcattcatttaatacatattgattaatctggaaatgagaaacaagggcactccagaagtctaaaaagtaagaaaaaagacacaaccacgttactgcctaaacaaccagttaaggacaccatgctactgcccccacaccaccagaaaatcacctttatctattccttatgactttggattcaaagtaacttgagagaaggcccagttggctggatttttgtcatttgcctgcctcctagctgcaactggaggctgataaaggaaggatatg

SEQ ID NO: 95329 - DNA, 1099210 bp, Homo sapiens
  misc_feature (1)...(1099210): n = A,T,C or G
aaacttgtgtttaaggaagatgtatctgagggtgattagttaaaagaattggttgatggagagtatatagataaggaaaccagttactaggtggctaatattcacttaacaaacatttattaggacccactgaatacctggcacaggtcctacagccataaacaagactcaatccttgcattcaaagatcttatagtgtataaaaagtaaacaattaaataaacagacaaaaatgatagattaagtaaatgtcctgtgagtgcacaggtaactatgagttctgaccgcagtctgggggtgaggtgtagatgactgatggaggcagtgaataaattatggaggctcctggaaagattgtcatcttaactgaactttgacgttaaagacatggcaaaaggcatgtggaaggtaacaagtgcaaaacattggaggtgatccattcctcttactctgagttgcaaataattcagattggtgaaattctagattttggggaatgtggtgggaaaagatgaagaagcagagaaaggaaagttggtgtgttggggtagaaagaagcaagagatatgtttggaaagagaaattgaaggcaagtggaatattctagggagaagaaacaagggtgtgatgggggagtggacaatggagataaacaaaaacaaatatatctgctgatttagagtccattaaacttgtattagatccattcacttggtaaaatgtactaaacctcttctatgtgccagggggttactgagatagctacagctgtagtatcactgctttcatcagggagctctcagtctaatgtaaaccatcttggccttcactctgatattaggagtcatgttctggcaatttagttagatggaccccactctggaagacatgagagaggaaagatgctgagggatcatcttcatctgtgtaattttgtatttgggtgaccagagaaatggcagtgtcattaactaggttatttctatttatactttctcccaattgcattctatggcccagcaaggataaagggaagcttacagaccttagcttttaaaccaaaggaccaaagtatctaccatactcagaagaaacatctgagtcagagagtaagaaatgcataatacttgagagacaatatagtgtgtgaattaaaggtggaattacaaggataatgaggtataaatctcattctatccactagttgtgtgaacaagttacttatttaatttctttctccctgtattttctcatctgttaaatgagggaaataaaacagtaactactccataagtttgtttaaggattaaataaattaaggcttgtaaagcattaatacatatgcacgtcatgtcacaggcagtaatctgaaagatgacactgtcagttcccagcagggcagcaggacaagaaaattagaaaactttctgggttttcttgatttggggcttacatcttaagagtatagtaagcacaaaataacattctacaattgcacattaagttgcatattaagcatctagatcaagtataaatatgcttttattatttccaaaaggcattttattagacactattgtatttggagaatatttaaaccaccataagcaagcatggattataaagcaaccttatttgaggaaacattaatatttttattaaagtgtctgattgtgaaataaacctctttgattggaacacactagtaatagggccacactttctgccttatttttcaactttcccatgttccaatgccattgacaccagctcattatgaggtgctctaaaacaaaggcagctggatagatcaagcccatttgcaccaccaccagagacaattcacagtggttgcctacctggacccctgagtgtcttcccatagaaaggacagctgttcataactgcttcttggtacaggaagtatgttgaggaaaaagggagctcaaagagctggattacctaacgcaactagaatttaatttcgacagagtcacaaatttttgctttttttaaactactgtatttctagcacttaaaatttagtgattagcatataacacgctagataaacattctgttggatgaatgaataatggtgcttcccactaggaaggaactttagtctttatagtgtcacagaggatatatatgccaatcgaccacccaggaagtcccaggaccaggaacaaagtctgctggagatcatccaggagatattctaggttcaggtgggtaactgatctcatccttggaagtcaaatataatgggaaggctaggcaagtgccaatttcacaggtaggttctgaagtccaaaaactcacatggttaggaagagtagcttgaatgagcagtgaaggcaatttcagcacctgtgtctgagactttttttttctctgcctgctggacagagatgatcatcataagtggaagataccaagagtaggagtgttgacctagctagaggtgtgagtagaatttgggtaagatggcctcacatacagaaaaggcactggatcaagagaagtggcagcaaggccttagcagctcattttaccaccttcagaaagtttgtgctgttctgtagggatgctacaatactctacaatactggtaatagcatggtggaagcctgttccctgtaatggtgataaggctgaattgagcatatacatgcatgtgtgtgtatgtgtgtgtgtgtgtgtgtgtgtgtgtgtgtgtgtgtgtataggctcgttttacaatacttggaaagatgactgcatgacactggtagagaaataggaatgctgggtgtggtgactcatgcctgtaatcccagcactttgggaatttgaagcagacagatcacttgaggccaggagttcgaggccagcctggcctacatggagaaacactgtctctacttaaaaatacaaaaaattatccaggcgtggtggtgcaagcctgtaatctcagctacttaggagtctgaggtgggagaatctcgtgagcccaggaggcggaggttgcagtgagctgagattgcgccactgcactccagcctaggtgacagagcgagactccatctcaaaaacaaacaaacaaaaaaagagaaataggaagaatcttatatttcctaagcacctgttaggaggcgggtcctggcccaaagagtttgggcatattatctcatcaatttcctatagtgacactgtcatacattattagtccaattttaaaatgaggagtctgagtttcagagagccttcatacttccctaaagtcgcactgctggttggtgcaggaacaggatttaaacccaggaactgagctgcagggaatttgcatcgcttgaggaagcattttgctgaaatgaacatttcctcttttctgggcaccaggtgcactgagcaaaacatgtttctagcttttagtagtgaatgattctcactcacagatgctgtagcagttgcacagctggtggattagtcagacagggactgcccacaagatcgtacagtgctcaatagaatccagtggcagttatccctggaaaattactcagaccatgtttgaagttttgcttcaaatggatgaactactgttgagtttgctcccaaatcattgctttgatttcttggtaccaaagcaatttgacttaaagcctggtcctctccagcaaatttattcccggcacatccctctttcatttgtcagctggaaaccccttcctttgcatccttcagccagttctcaaaattaactcaactgaacatggataaaccctttccaggactagagaatttttccttatcacaaaacttataccacactgaaccttctccagtacaacaaagcaaatacttgatcatgttttacatattctaattctttttattcctcaaagaaatatatgtagctccaaaaaatgaaagtaatagtcatccagaaataaccatggtcaacatattagtatattcttccagacctcttccctgccttgcatacactttaatctattttattgggcttatttgaggttggtacactcaaatgtgagtcaagctgctgacctggggtttagatgggctcgtgtaagaatacttagtgtggtctccgtatgtttattgtggcactattcacaatagcaaagacttggaaccaacccaaatgtccaataatgatagacgggattaagaaaatgtggcacatatacaccatggaatactatgcagccataaaaatgttgagttcatgtcctttgtagggacatggatgaagctggaaaccatcattctcagcaaactatcgcaaggacaaaaaaccaaacaccgcatgttcttactcataggtgggaattgatcaatgagaacacatggacacaggaaggggaacatcacacaccggggcctgttgtggggtggggggcgggtggggatggatagcattgggagatatacctaacgttaaatgatgagttactgggtgcagcacaccaacatggcacatgcatatatgtaacaaacctgcacgttgtgcacatgtaccctaaaacttaaagtataataaaaataaaaattaaaaaaaaaagaatacttagcgttgtctcatttgtgtgttatgcttccgtagctgctctgactcagtgctggcagtggagaaggaagaagggaactcagttcttctctgcatgttactgtttttctttctgtcaactcttttactccaggaagccaccagctaatacactttgtcagggatgtcatacccaaagctggaacaattctccctgctaaatgaaaactttcaaaggaactcactttattacctgtgctacacaacataaaccaatttttgattttattgttgaaaatcttacagggtactactgttcaataaccagctctactgtagaatagtgacaggcttcttgactatgcactacttctaggatgtgctagtcatggtggagtacacaggagtctaaggagcttacatctctaccaggggtagttccatttagtagcatttattaagcacctactgggtcccaagcagaatatttgcccctggtacaataatgaattgtgaactcttcccattccagtgagaatggcagagacatacatgctttgagaaaaaagagggattctcagggagtcagacatgggagcacagaataagaatgcttagccaaatttggatgtctagggaaagcatctggaaagatatcatttatcaactaagttttgaaggttgagcagtatgtgaaaaagagttgggaaagttatgagaggtagagaagacatcaagagcaaagggcaaggatgagctgtatcttctttattcactattacatctctagcacatggtacaatatctggcatagaagtggtgctcagtaaattctttttgcatacaaaagtgcaaagagaaggttttcaagcatttaagatggcgtaaagaaaggctaaagtgtactttgtgagactaggagggctgtgagatttgataaactgtctatgtgttatggagtagtgggagaagttgcagttagagaatttgaaaaattcaaaacagtaaaaggcaaaaatttttcctttagttttttctattcttccaattttttataatcaaataacatatctaatgttccagtaaaacaatcataacttctactaagtgactacttactagatcacagacactcactcttctaagtgccttccatgcatcatctcacttggctttctaaaaaatcttgtgaggtagttgctattccagttttgcagataagattaccatgtctcagagggtttaataagttgcccaaggtcatgtggttatcaaagtaggaattgatgcaggccgtctctccagaatctgcgcttttaggcgctgttctgaaactgaggttctagaaacttattctactgagatacatttgtcaccttactccttttggccctgggatgccacagaggaatcatcactaaagtctatcttcctactgccatcatgtctaagtcggagtctctgaaagagcccgaataactggaaggtcttcattggagggttgaggtttgaaacaacccatgagagtctgaagagccattgtgagcaattgggagcactcatggactgtgtggtaatgagatatccaaacaccaattgctccagggcctttgggtttgtcacatatgccactgtggaggaggtggatgcagccctaaatgccatgctacatgaggtatgagagagtcgtggaaccaaagacagttgtctcaagaggagattctcaaagactagttgcctacttaactgtgaaaaagatatttgttgatggctgtatcagctcatggttgcactgctatcaagaaatacccaagactgggtaatttataaggaaaagaggaaaagaggtttaattggctcatggttctttcagtctgtgccagaagcatgatgctggcctctgttgggcttccggggaggcctcaggaaactttcaatcatggcagaaggcaaacaggaagcagactgacatggccagagcaggaggaagagagagggcaggggagatgcttcacacttccaaacaatcagatctcgtgagaactctgtcatgagacagcaccagggagatgatgctaaaccattagaaaccacccctatgatccaatcacctcccaccaggccccacctccagcagtagggactacatttcaacttgagatttgggtgggaacacagatccaaaccatatgagtggcactaaagaagacactgaagaacatcacctaagagccaggcatggtgggtcactctcacaatcccagcacttcgggaggccgaggcggatggatcacttgagatcagaagttcaagaccagcctggccaacatggcgaaaccccatctctactaaaaataagaaaattatatgggcttggtagtgggcacctgtaatcccagctacttagggggctgaggtggaagaatcacttaaactcaggaggcagaggttgcagtgagcagagattgcaccacttcactccagcctgggctacagagcaagactccttctcaaaaaaaaaaaaaaaaaaaaaagaacatcacctaagacattactttgaagaatgtgggaaaattgaagtgactgaaatcatgaatgaccgaggcagtggcaagcaaagggattttgcctttgtaactcttaaggaccatgactctatgaataagattgaagtaccatattgtgaatggccacaactgtgaagttaggaaacttcaaagagtgttcagtaaattcatccctgtcaaagcaagagaaggctagtgcttcattgagccaaagaagccaaagtagttctggatgctttggtggtggttgtggaggtggttttggtatgaactatgattgtggaggaatcttcagtggtcgtagtagctttggtggcagccgtggtggttgtggatatggtggcagtgggatggctataatggatttgtaaatgatggaagcagttttagaggtgaaggaagctacagtgattttggcagctacaacaatcagtcttcaaattttggacccatgaggagagaaaccttaggaggcagaagctccagcccctctggtgatgaaggacaatcctttgccaaaccatgaaaccaaggaggctctcgtggttccagtagcagcattagccatggcagtggcaaaaattctaattactgcaaagaaacaaagcttagcgtgagagagagaagtgacagggaagctacaggttacaacagatttgtgaactcagccatgcacagtggtggcagcacctagctgctacaaagaaaacatgttttagacaatactcatgtgtatggacaaaaaattcaaggactgtatttgtgactaattgtataacaggttattattgtttctgttctgtggaagtgaagagcattccaccaaagactttttgctgtgtgaaaaattcacttttagcgaccactttttttggttgtggctgttgttgttacgacaaatctgcagagtaccaagttcttgagactccaagccaaagggagcattacatttgccaagcagccactgtatgccaggagtacagcatctcattcaatctttgtatttctatgagatatatattgtaattcctggttcataacttcagtcaaccaaagctcagttgtatccagcaatgtgatagatgtctcccagatagcaagtagtataaccaagatttgagatcatgtgtctaatgccagaattcatgcactttccactatgtgaggctgcctcttggaatcagaggactattttggtttgaaacacagctttactatttatttagcactttagaaactctctgaccctctgttttctcatttggaaatgagaatgatgatacctgtttaatctatccaattcttgagagaattactcaagacagtgttgctgaaagtgctttgtaaattataaagagcatcctcaatgtgtggcatcttacaaaatttcattttgcaattccatactcgttattttcccagttcataggtctgtggttccattctgacttagagagcttgaggtctgtttagaattaaacagttaactttagaattacagttacctctcctgtgtgagtctagccttccctagatcctgagcctagctcattttaggggagaaatggcatttctaccaggctacatttccaatatcttcagttaacagatggagggtggcactgagctagagtaagttctcccatagttatttaaatcatcagttccttaaaaaggatcttagaattcattaaatattcatgaagcatccttcctggcagctagtccatagtaggtaattacatagagtttaaaatatctgacgttgcttggaagcacacaaagctctgtcagctgcaagcagacagctgatttgtaatttaattaacatcctggcttgtcctgttctttgtggaaaaaaagcaggaaagtatttcctttcacttttgagttttgtttaaaaaaaattcaaatggagcacctgggagagctttttatttctcccatcagtgctgttacttacattcttctccaaactggaaaaattcctctttcaagggttctttgggcaagccatattgctaattgtgggtcattgtttttttaaagggtgattattttgaagatagatctggctgcaaagtacttacttattcaacaaacatttatcaagtaactcctatgtggcaggcactagaggtcagcagtaaaccaagcaggtggggcccttgaccccatggggagaggggcggggacggttagttcagtggaggagacaaacatccagcgaatcatcacagaaataaatgtaaaataaaaatgtgccaaggtttatgaagaataaggacagggtgccctgaaagcctatgaagcagggagcagtgtgcggtgtgcagaggcagggagagaacttcctaatctgggaagtcaggaggtcaccttgaggaagtgaaggggaaaattatgtagtctctcttgcctttcctcctcccatttttctcctatctgaaactacctacctccacccccagatttgcaacctatatgtaaccattctgaaagaatggattggaataacagaaataaaactgtgctccagtcaggatatcattcagagaattcatttcaaattaaagaaatgaatataaatattgatctgatcattgcactgaacattcctttatcttctcttgttttcttttttacccatgttttccctccagagaggaaggcagtgagtaggagtgaggatgcagtaggtatataaaagtgatgagacacaggtcatagataggctgaggcatcatggaaaaaggaagaagctggagaaaaggatttgctgggtacagactgcagaaatccctaaaagtaaatgtcaaagtgtttaaacaaatcattgttctcaaaataagaaggtggctggcagggcctagatgggaatactcaattatggaacttaaatttctacagccttgagatgaaatggaaattttttgttttcacgtggttcatcattgagctcgttttctttgtccttttggttttctgtttttttctgagattcacttacctcttccttagggatccctttgaaattctgttattattattattttgtttttaccaacttcttgcttctagaatatgtgcttcctttcagcccaagcacattttttaaattaagaggctttcttccagaagcagcactcaatcagtcaacacaggcctattggacacacactatgtatgtagcattctagcctgaccactctgcaggatacaaagatacatgtcagggttcttaccctcaaagaacttggattacagagggacagataaaacttgacacagagaacatggtttgtcagtatagttaacagagacagtgaaactaacaagttttttaatgtcaggctttgtgtaaggaactgtaattattacttaattttatacctgcttcataatgctactatcagccttaagtgggataatttctgtgacattcttagcaaagcgttcatggatagtattcactattaggtatgataatatgccacctattcatgtgcacacaaacatgttctagctctccagcttttgatttgttccttccccctctctctctttctctctctctctctctctctctcatcagtactgtgccaactcctgctacaagggggaagtagagcactttttatgaagcaacagaggtaaactcagatttttrtttatgaaaccttgaaatatttccaatttctggatcagttatcatgcactgtgccagcaaaatgccatcttccaaattgcaccagagaacctccagtgacagatcaggcacatgtaagattccgtttttaaattctgggaaactcaggatggtttgttctgactcacacaagcatcagcagaatgtactgagcagagcctggtcagacttccttagcctttttctgtctgtgtaggggggactgtggtagaaaatgagtatgagtataactgcgtgcaagctcagctgggagggctttctgattatgcrgatcatgttattgctcagataattacagtttaattcagttaaacttacatttactgatctctttttatgtgtcatttgtcggttgggcattggagattcagagatgaacatgactctacctctgctcttgagrcatttgtgggctactaggggagataggcacatggagaggtcattacagtataaagttcttattcattgacaaaatcctgtgcagaacactatgggagcataaaagagatacagatttccaacctttgaagtcagagaatgcttctgaggaggcaacactaaatctgataatcaaggacctaaaaaagtttgcttgatgaaggaatctggggttgggggcagggttaagcttcagaacggggacggggatagaattccagaagtcaggggcaaaatgaactaagatagggagacataagtagtataccaggcatccctgtcttgagcacctatcctgcctctactccccttagagctgaaacaggaaatataatctgtttacaaagtttctttattattattattattattattattatwatacttcaagttctagggtacatgtgcacaacatgcaggtttgttacatatgtatacatgtgccatgttggtgtgctacacccattaactcgtcatttacattaggtatatctcctaatgctatccctcccctctccctccaccacatgacaggtcccggtgtgtgatgttccccaccctgtgtccaagtgttctcattgttcaattcccacctatgagtgagaacatgcagtgtttggttttctgtccttgtgatagtttgctcagaatgatggtttccagcttcatccatgtccctacaaagtacatgaactcatccttttttatggctgcatagtattccatggtgtatatgtgccacattttcttaatccagtctatcattgatggatgtttgggttggttccaagtctttggtattgtgaatagtgcctcaataaacatacgtgtgcatgtgtctttatagcagcatgatttataatcctttgggtatgtacccagtaatgggatggctgggtcaaatggtatttctagttctagatccttgaggaatcgccacactgacttccacaatggtggaagtagtttacggtcccaccaacagtgtaaaagtgttcctatttctccacatcgtctccagcacctgttgtttcctgacttttaatgatcgccattctaactgagtgagatggtatctcattgtggttctgatttgcatttctctgatggccagtgatgatgagcattttttcatgtgtctgttggctgcataaatgtcttcttttgagaagtgtctgttcatatcctttgcccactttttgatggggttkttttttttttttcttgtaaatttgtttaagttctttgtggattctggatattagccctttgtcagatgggtagattgtaaaaattttctcccattctgtaggttgcctgttcactctgatggtagtttcttttgctgtgcaggagctgtttagtttaattagatcccatttgtcaattttggcttttgttgccattgcttatggtgttttagacatgaagttcttgcccatgcctatgtcctgagtggtattgcctaagttttcttctagggtttttatggttttaggtctaacatttaagtctttaatccatcttgaattaattttggtataagatgtaaggaaggattcccgtttcagctttctatatatggctagccagttttcccagcaccatttattaaatagggcatcctttccccatttcttgtttttgtcagatttgtcaaagatcagatggttgtagatgtgtggtattatttctgagggctctgttctgttccattggtctatacctaccatgctgttttggttactgtagccttgtagtatagtttgaagttaggtagcatgatgcctccagctttgttcttttggcttaggattgtcttggcaatgtgggctcctctttggttccaaatgaactttaacgtaccttccatgctcatggttaggaagaatcaatatcgtgaaaatggccatactgcccaaggtaatttatagattcagtgccatccccatcaagctaccgatgactttcctcacagaattacaaagtttcttttactcaagtccccttcaacagaccaagctgaggagagaaaaagaagaaagcacagactgcaatacagaggscttctgccaatggccctcattttgtaggcaatagagaaatcctcaaaggtgcccagaatgacattagtacctaccagacaagccttggaatgaaaagtttgactcagaattacccagaatgttagggttgattcttagtcagggtgtaagaatatttcctaaaaattttatttcctgaagataaagttgtcctctaaagacctttgagtcctaactaacttagaagactaagtgctctttctctagagtgaaattaacatgtatttgaaacctggtttgccactttccaggtatgtaagcttagaaaaatacctaattatctgagtctaagataaagagaataacacctatgtctcatatggtgatgatggatataaagcatttaatatggctccaggtacattaactgtagctggtattattattggttgtaatattgcattagtgttaggattagcattaatgttggtgttaatattaatcctagtgttataaatcagtacctttgttcagccaaaggaaataaagatttgaatacaagcagagaaattctgctatatcatatcagggtgattcctttggaagcttgagtttgagttaaagatgtgactttctcatcagttcttgtcatttcttgcttagtcataggctgaagactcaaagaaaaaaaaacacgggaatgtctggttggcactgggcagagtattatttaggtccacggtctcttggatgactccctattgtctacagtggacaccaatctgccttccagtctcctcctgccacactgtaccttacatcccmagcttcatccaagtcttacatcagctcactagaagcagacctaagatgagatttcatgtgtgcatgatttatggagggcagttccmagaaaaaaaaaaaacatagggagtaagggaagcacaaaggaactgtgcagaaatataggttcaggtacagtctaaatttaagctaatctcgctggatactttgtagtgtaattcacatcacgggatttgtctcaccgtgaggtatgagagttggggttcaaatatgactcctgtggacatccaagagaggaggcttcaatcacctaagggtaatgttcctgaaaagtatgcagatatgagccttcaatgggtaaaaaagatttccatgaatttggatggggacacaatagcatctgctacaatccactttaagacctcactgttccctcaaacatcatcccctcttaccacatgtctcttcacatgttgtgcctttggctggaatatcttttacctctttatggtattccagaccctgtttcaaactgagaagctgcagccagccagccacaaatgcttgcccatttctgctcccacagaactgagtttatcacgaggtatggtagcttatctgtgcacaagtataactcagtaatttatggtcttcttgaagtcaagggttgttcttttcagttcatattcttagcatatactgaaatgaatgatgaggagaaagatatgtagtacttaatagcctgatgtccttttagattgtgtcaagcaaatgatgtgattgtcctttttacttgaacctgagttcacagcattttatagtgaaaaagttttcatccagtagccaaaatagtattgtggcttaagcaagtgatatctatttcatccatttgtgtaatggtagctcatggctatattcaacaaacacttattgagcatatgtgttgtgcatatgactaaagactggagatgtgagaataaacaataccaatgtggtcccagtccttacaagattttacagttccgtggaaaaacacagaaaatacacaaccatatagcatgacaagagttgtaattggagactctagggagttatgggaacatgcacatgaagaagttctggagatctgttgcacaacaaagtgaatataagtaacactactgaaccgtatacttaaaaatggttaaaatggtcaaaattttatgtgtattttaccacaaattttaaaagaagcttaaaaatgagactcaatagtttgtttatatttattttataattattggagtgagaatgttgagaacmaaagtaattcagggctgggtgcggtggctcacgcctgtaatcctagcactttgggaggctgaggtggacggatcacctgcggtaagarttcgagaccagcctggctaagatggtgaaaccccggctctactaaaaataaaaaaaatagccaggcgtggtggtgcccgcctgtagtcccagctactcgggaggctgaggcaggagaattgctcgaactcgggaagcagaggttgcagtgagctgagatcgtgccactgcactccagcctggggtgacaagagctggagtccgtctcataaaaaaaaaagtaattcagaagtaatgggggttcagcatatatagtagggttatggcagtgtaagaaagcttgtattctgtcctgtgggcagtktgagccattggaagttttcaaggaggactttatcagcatgtgattcacaaagtcccctggatcagtgtagagaatttatgggaaacgggcaaccccacagacaggctagccagctcagaggctgtttctatagcccagctgagaacttatgggatcctgaacatggacagtgttggtgggggtatgggaagaataaggagagtgtggactcaagtattatttaggatataaatcaagcagactcatcaacttattaaattggcagatggcagcaggcaaaagacaggatggagtctgattgactcctacttttctggctcagatgacaacatagatggtagtgcctttatgagagaatcaaaaatgtggagcagacgtgggagttaatgggttgaaagccagagaaactaaaatgggcgcaagtgtgacaytattccactcataatgggcgtaactgatcaaaagtgaatgttaaatttgatccatgtttctgaggcagattacattcccaaattattcataaggttagataaacmaaagcatggtatttgcagttcacagaaatgttctaacctcattgtgtcgtgtattctcagtgatttttttttttctactaagcagccaattcagttttcagacttggacttcatctctttatggggtagaggagaggctgatgataactgaaagaggattcagactgcaatgatctsgatagggtcttggcgcttatgcccgtcagttaaggtgactcttgacaagtaccttaacttcttggagtgttagttttctcataggtaaaatggccaagaatgattgcaatggaacaagtttgtgagagttctttggaaactgcagttatggcattgttatttttgttgagagagatattacttgggacattgaagaaagcctaccttgccccagaaagtataagtgtaagtattgataatctgcttctgaggaagagtgaacaacagattgaattaccatccctggagtggttcttgttacttttccactatgagtcagtctgagagctgatgtcctagaagttttatatatatatgtatatgaaaaaattaaccattgatgataacaataatgggacactgggaagaagttagacatcacaattaagcctgtgatggtgttatgacaatgtttagatccctgttcccaatatccctgtgttatgcacaaggaacataggcaaagtaaagcaaactaacactttattatctgattaagaggtcagatgtagagggttccctttcttctttcccaggtaggacaacagccttgaacaatggaactctaaagggacagatccaagggaaaaggggtacaaactagaaaaagacacagaaataggatggagacccaggctgaggccaaaaatggagatagaccccaagaagagggctgagttccctcagagcattcctaaccctgaacctttttttttctctgccaacttccttatatctgtttggaagactcaaacaataatctttactggtacagtcatgtgtaagcaagatggttaagaaaagaggaaaagggaacaagagagaagaagtatttacctctgtcccctcagggagccatacaatataggcagataacttgccttgatttttaaagttctttaaaagagctagctctgcttctaaaaattgtgatcttttgtcctggaatctgactaacccaaatcaatactccttctcctagcgggtgaagtaaagaaagataagcttgtcttctctttgagtctaatacaaataatgtgggtgacaaaattttttcctcatttcaaaaggaacttaaatcactcacaaattctgaargaaaattaagttttctaaatgggatatattggaattctgttttcttcttgctcagtactttttttcttctccatccataacctagaatttttaacacatacttagctactctggtcaggagggttacctcctcacttacttgaataaagtaaatgttctgtctcatttgttatcacctttctgtagctcataaacaaagagagtatattatcaggcagaaacaagtctggacattggtcaatattcgtggttaactcagttctgcttgcatttgacctggtctatggtgaccgccagaagagtctgcagcaaagcccatttggtgaagtcaacagtaggtgcacactgtgtcctattgatgaagttagaatatgaagttcagtctatatcctttacaaacactgatatatacatacttgtcctttcttttcttttctcctagaagtatcgatatcaagatgaggacgctccacatgatcattccttacctcgactaacccacgaagtaagaggcccagaactcgtgcatgtatcagaaaagaacctctctcaaatagaaaatgtccatggatatgtcttgcagtctcatatttctcctctgaaggtcagttatattgctcttccgactttatagttggtgacagtagttggtcttaattgctaatggagatgtttgctggcccgattaaatgaggctcttttaaaacatgatagaggacacgggttgccaaagggtctttcttgtgcattggaggcccaccttgtatttttgggacatatttttattgcaattgtttgaatatctggaaaaatcattttagttgctgagaatggagtaaagaaagcgccaagagtgaaacactgaaagggaaaataagctaaccacatatttttaaaccccaagtacatcaaggttttgctcagatgctctctgtttgtcagtactcgtggtccaacaaagggaacaaatataacatgatcacatctaatgattgctttactgtctaaactataaaggaaaatgtgtgaattgtctaatcaattcctctattttatcctagagaaaattgtttactagatttatttcaattcattgtcatacttttcccaacactttctactttttaaaatttaattttaaacaattgcttgataaattatatttcgacaagaagaaggtataattaaatgagaaaaatacttttctatgccccttggctgtgcaaattactctgattttttttttttttttttttttttttggctgaactggcgctactggattttgtgtttgggataaaaagcttataaaggttgattaaagtttaaaaagaaaaaatcaraatatggctgaaataacagaattgaaatggaaaaaataaaagcacctaccaattaactccttagtaattattgctaaacaaaaatttctttcatcacctagaacattcattttgccagcacttctacacagctgtgctacaataaaaaataaagacataaaagtgtctcccgtgttctctggatcttattatacctgcaaaaacatctaagagaggttaacttatgcttaaccttacgtttcaaattttggaacatttcaaacatattggtatgctaaaaatgtattagcaaataaattagctatagctactaccaatacataaaaatattagaccaattatcaaattccagtaaatattatatagtaactaaaaatatgtaaatattaatattatgcttctgggattcattgtgcaaatctccgcaatttctttgcaagtatttggatgactggtggaaatgagtatgtttaacctggagaagaaaagattaagaattgggggacatgggactaaaccttttttacctccagagctgtcatctgaaaaacacgacatcgatgtcatgcggaaggcagaagcagatccactgtgcataactgacaggaatgtatattatatttgggaacattttaacaccacagctcctgacatttatagctactcagaaaaattatagactacttcatgagacagaagttccctatccctagaaatctttcagcaatggataatgactcgtcagaggttttgtagaaaagactccttcttccgcagaagggtaaacaaaattgtctttaaggtcctgtttaggaatcagaattctgtgttcagtatagaatcttgctgattcctagagttagacagtactctttaatattttctaacaattgctgatccttactctgtttacaaaccactgaaaattgagaaagggcagggccgagagactgaactgcattgaaggtacttacatttcagttttattctttcaaactggttgaaaaactccctataagaacctccatagatcaagcacagtggcccgcacctgtagtctcagcattttgggaagctgaggtgggaggaccgctgatcccaggacttcaagaccagcctgggtaacaaggcaagaccttgtctctgcaaaaaatttaacaaattagccaagcgaggtggcatgcaagtgtagttgcaggtatggaggagtctgaggtgagaggatcatttgagcccaggaagttgaggctggagtaagccatgatcacgccactgcactacagcctgggcaacaaagtgagaccctgtccatgccacaacccccaacacacagatacacaaaattcgccacctttctcccttcccaacctttcctccttaatcacctctagagcatacctcccaaagaactttaggctaagtaggtaggataatcaaggctagcattttatatccttctactagaattgataatatggtgattattagtattatatttaagtcaactaataatgatagatgaaatatttgaaataagtgcatcttttgtcttatgagtaggatcatgcctgaaagtagtgagattccttgtgttacttctgggattcaaaaatggaatagggagagtccaaattttataattagtgctattataattatgagggatgctagcccggttacagtaaaaaaaaaaaaaaaaaaaaaaaaaatgaacagaacaatgaaagcaccatgggagctttgttttgtatattaagtcttcagcatatacatgataatataattatctgaacatctgctgttttggtgattgcaccatcatttattatgctactcactgtctcatttggaaaatgtatatcagagttgaggggaaagtatgctttttctaaagctcagatctcatataaacaaaggaatttttcctatttttcctttatcctttgccttccaggaatcttaaaattaactgtattcaacttcaatgggtttctcttagcctagattttctgttatatttatgtcacttctaactaatttcctagccttttattgagggcacctcatgtcagttttaagaacagccaactatgaatagcaggcccctgggataaaacaccatggtcctaatagatttttctcctttttggaaccaccagttctgtggtatggccccaaggtattgtgaagaggagggaaagggaagctcatcaaggatttctacactggggctgtgaggtagctattttgggaccaggatttttttcatcatgaccttctcgaggtgttgtttatgctaaacaagatgtgtttgagtttttatttatttatttatttatcttaaacttgtattataggtacagtggtacatgtgcaggtttgttatataggtaaactgcatatcatggaggtttggtgtgcagattatttcatcactaggtaataagcatagtatcaaataggtagtttttcaatcctcaccctccttccacccatcattttcaagtaggtctcagtgtctgttgttcccttgtttgtatccatatgtactcattgtttaggtcccacctgtaagtgagaatatgcagtatttggttttctgttcctgtgttagtatgcttaggataatggccttcggctccatctatgttactgcaaagaatatgatctcattctttatcctttactttcttttttttcttttcttttttgaaacgaagtttccctctgtcacccaggctggagtgcagtggcacaatcttggctccctgcaacctctacctcccaggttcaagtgattctcctgcctcagcctcctgagtagctgggactacagatctcctgacctcgtgatcctcccgccttggcctcccgaagtttttatggctgtgcagtattttgtagtgtatatgtaccacattttcctgaacccagctactgttgatgggcatttaggttgattccttgcctttgctattgtgaatagtgctgcaaggaacatacctttgcgtgtgtcttaacggcagaacaatttatattcctttgagtatatgtccaataatgagattgcttggtcgaatgacagttctgttttaagttatttgagaaattgtcaaactgctttccacaatagctgaaataatggtattcctaccagcactgtataagcattcccttttcactgcaacctcaccaacatctgttattttttgacgttttataaaagccattctaactggtgtaagacggtatctctttgtggttttgatttgcattactcaaatgattagtgatgttgaacattttttcatatgcttcttggctgcatatatatcttcttttgaaaagtgtctgctcatgtccttttcccactttttttaaaggattgttttttggcttgttaatggattctgaatattagacccttattggatgcatagtttgcaaaaattttctccaattctgtaggttgtctatttactctgttgatagtttcttttgttgtgtagaagctcttaagtttaattaggtcccgtttgtcaaattttgtttttgtcagaattgtgtttgacatcttcatcatgaaatctttaccaggttctttccagaatagtatttcctaagttatckttctgggtgtttatagttttaggttttgtatttaagtctttaatccatcttgagttgatttttttgtacgtggtataaggaaggggttcagtttcaatcttctgtatgtgactagccagttgtcccagcaccatttattgactagggagtcctttccccattgccggtttttttccactttattgaagatcagataatcgtcggtgtgcagcattattgctgggctctctgttctgttcccttggtctttgtgtctgtttttctaccagtattaggctgttttggttactatagccctgtagtacagtttgaagtccaagaatgtgatactcacagctttgatatttttgcttaggattgccttggctctttgggctctgttttggttctatgtgaattttaattgttcttctctaattctttgaagaatgtcattggcagtttgataggaatagcactgactgtgtaaattgctttagggagtatggccattttaacaatgttgattcttcctatccatgagcacagaatgttttcaatttgtttgaatcatcttggatttccttgagcaatttttttgtcatccgtgttgtagagatcttttacctccatggttagctgtattcataggtattttattctttttgtggctattgtaaatgagattgagttctcgattttgctctcagcttggatgttgttggtagataggaatacttctgcttttggacactggttttgtatcctgaaactttgctgaagttgtttatcagatcatggagcttttgggtagagactaaggggttttctaggtatagcatcatatcatctgcaagcaggaatagtttgatcccttctcttcctatttggatgccttttacctctttctcttgcctgattgctttgtctaggatttccaggactgtgttgaaaaggaatggtgatagagggcatccttgtcttgttctggttttcaaggggaatgcttccaacttttgtccattcagtatgatctgggattttatagctcaagatatgcttttagattgtcttagtaaagacactctgtgtatctctccttcaacaccaatagtaataggaataaatgtgtaccattttgctaggggaaaaaaaaagtccgttttaaggttggccaattttgtgatgtaaatattcccagcctggctgatttcaggctaccaacctaaagctactttttaaatatgtggaaatggaggcacatgaggctctcatgagctagtatgagtgagctccagcacagtactgtgatatcagattcaagcactagcatttttatagcaataggatacatttcctaatcaagttgttattatcacagttcaactgttgaaaaacttgcaatgattaaaatctaatgggttattttctcataaaggaagcctgttagaatcagggaactgctaaaaaggtacaaggtctccattagaactgtcatattttcaacttctttgccttcttttatctgtctggtattcttgggtcaaacactaaaaggaagaaaaggaggcaaaacacataatcagatgcttcccccagaatcctactgagaaaacaatgtgactctagtattaatggagaatttacatatggcatgcctaaacagagtgtgagattgctggataacagtttaaatgtcacattgagtgggctctgaatcattagctgaataatctcactgtcacaggtttgagtatcattttctccatcgtcgygtattacttgaagccttggttctaagattcatctgtctttggtgcacaccagctgcctaagtgataggatgggctttcttagcctgttttcattagagtgctttggccagtgtgaagtgtgggattggaaagagaaatgcaatttagtggtgaattcaagggaatttgttttcctttcctcaaggtggggatgcattctcttcagatgctacctagaatctttcataaaagaaattggcctataataaaccacaagaattttcttttcagtttaggtcttctcactttaggtcagttcaataaatattaactgagtgcctactatagcactaagtaatggggaaacaaagagcagtgaaatgattttcagtacctagattattctcttgattcataattaattatttgttacttattattattccgaaactgaaatttgaactcctcaaacttaaaactatggggcccaagcacctaccagagtgccctgtaggagtatttattagcgagagagagagagagagagagagagagagagagagagagagaaagggagggagttaactgctgtcctcttcttccttacctaatcatcacttatacaaaatttcataaattctaaacttcatattttatcacatattaacatatctgaaatctggatgtgtcttaagatcaatggcatcttgcagttaaaattggcagtatttcctagggtgtattaaaaaagaaatgtgtcttgcagtcaaaaccggcttagattcttaggttcagtaactaattacaaggaagattaaagcctccttttataaattggtgtgaattactttaatcagataaatattattgtgtgtcttcgaattttcacagggactggaataaacagttctgggaagctttgctggaaattaggagtatgtgaggtttgggtaaacttcaataccctgagacaactgggcacttgttgagtatatatagaagacatttgagaatctgtaggcaatgcacatttgagaaattataggaggagagctgaagcatgaagaagccaataaaaaaactatagacaaaggataacaatgtgtatttttatactattttcttactagagttgccagagcacaatcataggaaagtatgttttagccaaaagtacaatraaaaccctcttcctacataaagcctttcctgttaactcttggccaaccccgactggtcataagatcctatggcacaaggagttagtgcatcccacatagtcatcattttaaaatatgccttattctattgttctaaaaattatttgttgaactatacagtagtccccacttatctgtgggggatgcattttaagacccccagtggggccgggagcggtggctcacgcctgtaatcccagcactttgggaggccgaggcgggtggatcatgaggtcaggagatcgagatcatcccggctaaaacggtgaaaccccgtctctactaaaaatacaaaaaattagccgggcgtggtggcggatgcctgtagtcccagctactcgggaggctgaggcaggagaatggcgtgaacccgggaggcggagcttgcagtgagccgagattgcgccactgcactccagcctgggcgacagagcaagactccgtctcaaaaaaaaaaaaaaaaaaraacacccccagtggatgcatgaaactgcagatagtaccaaatcctatttatactatgttttttcttatgttttcataagtatgttatcacataattaaatttataaattaggctcagtaagggattaaccacaataactaataaaatataattataacaatatactttaataaaagttatgtgaatgtgctctctctctgtctctcaaaatatcttgtagtgtactcacctgttttcaggtcatagttgacctctggtagctgaaactgcatgaaaagtgcaacctaagatcaggaaggactgctatataatgttctttcctctaggtttgctgtttttcttgctcttagtaaatgtgtaagctcccaagacctggactgcatcttatttttgttttgttttgcttttcattttactcccttattggaatctaaaatgaaactagactagcatctcccaaagtatgtttggtggaattttgtcagcattattaaaataaaggtatgaatgagtgcttaaacacatttgaggagttaaatccattaacttattgaaggatttctcagagcctttactataataatatgaaatataaacatctaagatggaaatatgattagtacaaagtatttcccagacatattttgtcatagaattatttctttaatataaaattatattttggttgggcacatatacttttggagcgtacaataaagaaagtgtgaaagaagaggtctctcaagacgtagaaaaactgtttaattttttggagctggagaggttaggatgggtgttgtcagagaaaaaaaattatacacgagatcattttttacttgaaggaagtatgaaataagggagaaaagtcaaggttgccctatactctagcagttgtgtaacagtatggaaaagttctgagaattgccaagtagttggctaggatactgacgcataatgtaagaattaaggaaaggggcatagagtgggcccaaacatcccataaagcaagagagatgggcatgaacaggtaatgaaggaccttatgtagagactggacttcaccttgtaggtaatgaggggtgactacagaatttttaaaaaggagaatgacatgacctgatatgcaaattagaccgttattcatgtcatgtggtacagtggaaggaataattggaaaggtatgacatcagattcaagagcatcaggtgaaatgtaaaagatagataagctttgatgtaaagcagaggtattggggttgaagggaaggatagattagaaggcttatttaaaaagagatatcatcaggacattgagacatattacatatagaaggtagaaaagagagagaaatagaagataatttacaatttttaaaatttgaccccagagtagaggatgtatcatgaaatgaaaccaagaatgccagaggaagagcagattttagaatggcaggggagggagtgggataatttctgagtttatgttggagtaactgattttgaagtatttatgttatacccaggtagaagtgtttaacagtcagtttgaaataaagatctgatctagaaaatggaaactttgacgttttcagtgtagttggagttgtgaaaatggatgggattgctcaggagaggggagaagaacacagaggactgaaacacaggtccaccaccaccatatatgggctttggggagagagaggtacctaccgaggataacatgaagcagtgagaaatttaccacaacatttagcccttagtagcttggagcttctattttcataactaagttatgaacttctactaaaagggagtcatgtcttttaaatacagaaatttgtagttcctctacaatgcctaagatggtgttgaccaaatagcagatgttttaaaatacgtatttgattaatttaaaaaaaaaaaaaaaagaaataccctatgagttacatttgaccccaacagtcatgaggccctgaccagcaactgaaaataatgtgtttatttttcctttctagacataatgtttttaataataccactgattagaaaactattctgattcttgatattttaggcaataatctttaaaagtgtaaaatcctttcatttctatctcttgccactagatggtggaagtagctgagatgatcatcctggaagcatctagtcttgaggaagaaacagatttgtgaagctaaattagaagctcttagttaataaaaacataaaggtttggcagagatttgtgacttgtgcacagcacattgtgttccaggactagtccctggtgagaggaaatggttgaaatatggccttgacagacgcattctgaatgtaggcacaaaatctcctgatcgaaattccatgcaaataaagcattcctttcctcaattatctttaactggaaagggtacaaacagcatacccccaataattctggctatttaggccagatattgaaaagcgggaagaaaggaatgttaggcataggactgaaccagcatctcaaaatataagaattctttttagaaccaaagtcatcaagggttaaggcaagcttgtctaacctgcagtgatgggccacctgtgactcaggacagctttgaatggacccagcacagattcgtaaactttcttaaagcattatgatattttttgcagtttttttttaagctcctcagctatcattagagttagtgtattttatgtgtggcccaagacaattcttcttcttccaatgtggcccaaggaagccaaaagactggacacccatggaaggggttctctctatgggttttgaaagatgagtttgtgtgatgaaattcaaattttctacttcttttatgtacatagtattaataacaataatgatgatgaattttttctaagaaatattaggttattaaaatcataataagttttaaaaataagtgtttatagaaaattctagataagtgttaatagtgattatatgtagctgcagatatttctagagttaacccagttacacagaaatttttctcaaaactaagatttcactattgccaaaactttctgtaacaattagaaataatgtactaacactcacagaggctgctcatcaatataaggcacttattgttactgtggttaaagatgatattgttagtggtaccctaaaatgatacgtaacttctacatccctcccatatttctaaacagtctggaattgtaaccttttggtgagcatgttttcaattcttttttcttagcaaagataatcggaaatttttccaaactctgcaaaaattaattctgagactgttagtgctgttgaatttttaactctttcccagctaatccagaaaagtaatagcatatagtggaaagcagatgggctttagaatcagacttacttgtgtttacaatgtagcttagttgctttctagctgtgtctattagtaaatctattaacttctaacctcttggaaataatagtatggaattcacattccatgctgtaaagattacttgagataatacgtggaaagtctgtagtacttggcgcctagtagttgctcagtaaatggtaattatttcacattaaaaaaatagaaagtgtgtatgtatytaagaacaaatctaaatttaagattagttaactctttgagctctcagtaatgattggaaattgttaaatcctcatccttgatgtccttcagagaatagttttacactgtagaacattcctatctcagctaagtaagggtgtgttattcaaattattatctcttctgcaaaagtgaatgtcatgttggttagctcaaattgtagcaaatgagttggggacattttgagtggtccaaacaagaatttactaaagcataaagaaatggctttcttttgaggctagtgatggaagatattggaacatatgcataacctttaaagataatcaggatgtgcaaggatcatttagtggwcagaagctatacagcaaaacacttatttcatcttgtttaataagtataaaaatagtccagaaggcaatttttaaatgcstctattggtatatacaaaggaaacttatgtaatcttatataagacagaatgttgtacaagaaaacatggtagagaaggttgaattgattttctccaactcagagaggaattgccagtgtctagcaatcagatttaatcctaatgcagctcccaggatacattcttccagtccagctgactcaccaaagtcactctgaaggcagatgatttgttccttctgaattggcagaacactgagtatgttagagtttgtggccaattttgggtcacaggtaagttcatttaaaatgcattcaagagacagttactgaagttcctttacatagaacagaacaactccccacctcccaccttgaccttaaggcccattaagcaatagggcacatacagaagtaatgagacaaagttaacttgaaattacagtaattgaagttactctagactggtgttccagagattttctggtttcaggactggtgctttagagattttctagtttcactgcttcatattacatgtgaataaattttttcttttcttttctttttttttttttgtttgttcgtttttgagacagagtctcgctctgtcgcccaggctggagtgcagtggcatgatctctgctcactgcagtctctgcctcctggattcaagtgattcgcctgcttcagcttcccaagtagctgggactacaggcatgtgccaccacgcccaactcatttttgtatttttagtagagactagagacggggtttcatcatgttggccaggctggtcttgaactcctgacctcaggtgatctgcccaccttggcctcccaaagtgctgggattgcaggcttgagccaccatgcccagcccaaagaaatttaatttaaaaacttgtttctgatggtagtttattttctcagtggactataagacatattacctgcttttaattataaacaagcaatttaaaactatttgaaatatcatttccaaaagtaggttttacttctcttataaacaattaaagctgagctgccgctactcattcaacatatttatatgaattagaaaatggagccccttctcatacaagatgataccttgctttagtttagataatgcgctgcacagacccaggcaagaggcttttaagttcagcaataaattccttaaataatcagataacgcaatatccaataggaagcctcatagaatcactagacttacatctcagcagaggcattaggaataacatattgtaattacttaattttacaaataaagcaactaagaatcacagctgttatgagactttcccaaggcagccacctagctaacactatagctgagacaggaatccgggtcttggattcctagacctgagtttatgtctctgtttcccaagaaaagtaaacaacaggtgttctcaactcagcagatcacagaggttcacttatttcaatttctaggggatgttattgaaaattgttatcactgagttattatttgtttatgccaattttcagctttagtaaagggccaaatctaggttgttgacgctagaccaacctctctcttcatcccaaatctctccaactaaactgtgtgcatcagattgattcagtaaaaataagtctcatcattatttaactcttctgtccatttgtgtacttgtgtaaattctgatgagatagttttgtaaaaagaaaatgtaaatgatttacatctcaaagactaatgtacatcgtagcaatgctattatttctctatgggatgctttcccagagctgcagggcagtgtgtgggataagagctaggcatggcatcagaaatgtgccatttgagaattcactgaatgctcctaaacctaatttccacatttatatactgatgataatagaagcacattgtgggaagtaattaagattaaggaggttatcmtttgttggcttgaattttaccatctacgcttaaagaaccccttcttccacactcaaattcctgtgtggctacctccacctcaacttctatttcyctagtccctattttccattccaccctctttttctcattcccactttctagaatggtcaatggaaaagtaagagaaacacatgataaagaaaaaggagctgggcagtgagggttgggtggtgggtgggggcgcagaggggaatgtcagcayacatttagttcaaggagttgtcagtatgtgggacttccaaacaaccaatgtaattttaggctacattaatggagttgcatgccaagaacaaagagatgacaattctacactatgctagaatgtatcattaggatctgaggaccatatttcagagagaatggcagcagattggggtgcttccagagaggggtaaataggctggcaaggctattaaaaccatgtcaaatgggaacatcaaaggctatgagtgatgtggtccttggagaatagactcagctcacaatgacatggtagttcatctttaaattgtttaaaacaaagaacttgtccatacaatttttgtagacatcaagacctttagagtaaacaatgaaagaaaaacagagtttatgtaagttaaaaaatttttgttttaaataacttggtccaaagagagaatgacctgcctcataaggtagtgagcttcctgtcattggaggtattcaagcaaaaggtagaaaatcttcaatgagatattgtagagatgattcaggaaagagaatgttgaatagtattttcaacctttttccacacataaattactttgagaaattgatttgaaaaactatgacccctttccctagataaaaactatacccacaaaactatacccacaaaaatattgcataaaacttcagaaatgatatgaattacttgaagggcatctatggacttcctatggaacatagacttaaggttaggaatttctggatggaatgaatttcaagttttctttcatttctgagaaactatgattcctatttttctgtcccacagttactggctggttaaggaatgcttgtccttgagaataaatcttttgtaaattttggaaaaaataggaggaggcctcccaatctattgtgtctgtgaggcctgcccaattccacagcagccctcagcaggaaagatcaacaggttcccctagatgagaaggattttagggtacatttgcttcaggagggttctctaaatgcagaactgcttctgattccattctcctcagtatttttgatgtattcttacaaggcagttttctgtttattagttagtgccataagctttcaccatctattcaagccaagagcaataatatcttgtctctttgaatttgggttttaactgtcataaggctgttttctttatgcttgatggaagttgcattctagcaaagaactgatttcaaattgccccatcaacttgctaaaatgatgatacactttccatagaattctatcacagggagtttccaatatgtggctagactcttcatagaaatatcagtcataaaatgtgcactgggtatttattttttcatcagggtcacagaaatgcacctgaactgaattcttcttcttgtstctgtaccgttaaggtattgacaggttcagaattgctgggtttgaaattttaagagtagctaactcataacatttcactttctgctccagggcagggtgagttgcttataaatcagcctgcaaatatgatgaattggatgtctccaactcaattagcttaatgtgggtaggaggatttccaggctttatggkctctgttttactaatctactgagcagactgttatataaaatgtgtctgagtattaatgtctgaacctcagagaaatgtggttggtatttttcacttcagcatccaatgtcattctgtatttcatagctttgatttggatccagagctactgagtgatggttcttaacatgatttatattgttgcacgccttagcttgttatctttctgccttctgaccaagtttaaaaagtagcctaataaaattgctgctgtcactgggtgatttaattggggggaaaaatctcagcaatttaaggaaaactgcaaaactggagctattcctctgtcaaataaatgatcaaatgaaatgggcctcagcaaagcagatgctgacagttttgagagcttccgaggcacgcatcatacttcagttgtgagatctgttagaggaattgatgaggaagtttgtttgctttttgttttcttaaggtgaatatattggggccctgggaaatgtttatattgaagagaacattttggatgtaaatatattttgtgtctaggtatatcattcggcattttctttatattaactgtctatgaacactcattagctaaattattttctatgtattttcttcttccctcttctcttttttagtttctctgtcaatcccagctctgtcttgcacgttgttaaaaatttggtaaaactcaaaaatcattcttcattgcaaaaagatcagtgtgtgatatctgtagtagcctattaaactctttgtaggttctgaaacctttccttaaaagactgggaccagttgttacgttggccactaatagttttgctcagctgaagtctaactgaagttagacatgttattgaatttttgtattttcaaccctcgtgagtgatgatgtctcttgaaattatttattctgagtaaaattttgtatcctttgacaacatctccacaactcctcctcccaccaaccaccccaactcctggtaaacacctttctactctctacttctatgagatcaaatttttagatttcacataggagtaagatcatgctatatttgtctttctgtgactggcttatttcacttaaccaaatgtctttcaggttcatccatgttgtggcaaatgacagtatttcctttttctttgtggctaaatagcatttcgttatgtacatataccacattttctttatccgttcatccattgatgaacatttaggttgattccatattttggctattttgaataaggctgcaacatacatgggagtgcagctatatcttcaacatacygactttatttactctggctatatacccaatagttgaattactgaattatatgatatagttctattttcagttttttgaagaagctctatatactctttttcataatggttgcattaatttatattcccatcaacagtgtgtaagtgctcccttttttccacatccttgccagcgtttattatctttgtctttttgatgatagccattctaataagtgtgagatgatatctcattgtttttttacttgcatttccctgatgattagtgatattgaaaatattttcatattcttcttggccatttgtatgtcttctcttcagaaatgtctgttcagatcctctgcccattttttaatttggtggttttctttccgttgagttatttgagtttcttatatattttgaatattaattccttaacagatatatagtttgaaaatattttctctcattcatgtaggttgcctcttccttgattatttcctttgctgtgctgaagctttttagtttgatgcagtcccatttttctatttttgcttttttttcctgtgcttttagggccatatccccaaattattgctcaaaccaatgttgcgaatctttttttttttttttaggatagaatatttatttatttatttatttatttattttttatttttttacttttatcctttttttttttatactttaagttttagggtacatgcgaatcttttcccctaggttttcttctagtagtttcatagttttaagtcatgatcacagtaataagtacatgatcaagaccagttgatcatagcaaataaactttttaatgtactgctgaatttacattgctaatattatgttgaggattattgcatctacgttcatcaggaatattgttctgtagtttctttttttcttttttttatatatcatgttcttgtttggctttggtatcagggtgatgctgtcctcatgaaatgaatttggaagtattatctcctcttcaattttttggaagtgtttgagaagaattggcattaattcttcaataaatatataatagaattagacactaaaggcatcagattctgggctttctttaatggaagactttatactgattcaatctccttgtttttgatctattcaggttttctctttcttcatggtttagtcttggtaggttgtatgtaggtaagaatttatccattccttctaggttatccaatttgtccatatataatagttcataatagtctcctatgatcctttgtatttatatcagttataatatcttctttttcatgtttgactttatctgagtcttctgtgtttttattatacttagtctagctaaaagtttgtcaattttatatatttttttcaaaaaacaacttagttttactgctcatttccagtgtttctctagactctattttatttatttctactctaatctttctatttccgtccttttattaactttgggcttagttttttcttcttttcttgttcattgaggtgtattaggttatttatttgagatctttttttttgatgtagacatttattgctataaacttgcctcttaaaaccaattttgcagtattctgtcggtttttgtatattgtgctctcattttcatttgtctcaacagatattttaatttttattttaattttttaattaactcattgttcaagaacacgtttgtttaattttcatgtttatttgtgaattttccaaagtttctcccattattgatttctagtttcattccattgttgttggaaaagacacttgatatgattttagtcttttaaaatcttttatgatttgttctgtaccctcacacatgatctattttggaaaatgctctatgtgcacttaaaaaagatgtatatcctgcagctgttagagaaaatattctgtatatgtcttttaggtccatttgatctagagtatagtttgagttcaatgttcccgtgctgattttctgtctgaataatctctccattgttaaaagtggggtgataaagtctcctactattattaattttagtctggctctccattcagatctatccatatttatgttatatgtttaggtgcttggatgtcagatgaatatgtatttataattgttgtatgttcttgctgaattgaaccccttatcattatataataacctttatctctttttatgatttttttacttaaagtctattttatctgatatatgtgtaattcttcctttcttttgattttcatatgcataaaatatctttttccattccttcacttttagtctatgtgtgttcttacaattacttaaagtggggtttcgtaggctgcatatatttggggtgtgtgtgtgtgtgtgtgtgtgtgtgtgtgtgtgtgtatttaagttcattcagccaatctacgtaatttggttggataatttaatctatttatatttaagtaataactggtagataaggactcctcactgccattgtatgaattattttcttgttgttttgtaggtatttggttcctttcttcctctctcgttgtcttgctttgtggctaagtgatttctgctagtggtatgttttgattccttattttttaatttttttgtgtgtctatcatgtttttgctttctaattaccatgagacttattttaaaatgttacagttataacagatctttaattaatttttttatttttagtttttctgggtacacagtaggtgtatatatttataaggtacatgaaatattttggtacaggcatgcaatgtgtaataatcacatcatggaaaattcagtattcatcccttcaaggatttatcctttgtgttacaaacagttaagctctttttgttatttagaaatgtacaattaaatgatcgttaattctagtacccctgatgtgctgtcaaacagtattcttattcactctaactatacaactttggcatactttaaacatccccacctctcctcctcacccccacccctgccccaactacctttctcaggctttggtaatcattctcctactccctaaatccatgagttcaattgttatgatttttagatcccaaaataagtgagaacatgtgatgtttatctttctgtgcctggcttgagatttcagttaacataatgacctccagttccagaatgacctctattgtatataagtactacattttctttatccatccatgtgttgatggacacttaggttgcttccaaatcttagctattgtaaacagtgctgcaacaatatgggagtgcagatgttcctttgatatactgatttcctttcttttaggtatatacccaggagtgggattgctagatcgtgtggtagctgtatttttagtttttaaaggaacttccaaactgctctccatagtggttgtactaatttacattcccaacagcagtttacaacagtttccttttctccacatccccaccagcattcgttattacctgacttttggataaaagccattttaacttgagtgagataatatctctttgtagttttgacttgcatttctctgatgatcggtgatgttgagcacgtttccataggcctgtttgtcatgtgcatggcttcttttgagaaatgtctattcgtatattttgccaatttttaaataagattattagattttttttctatagagttgtttgagctccctatatattatggctataatcccttgtcagacaggtaactggcaaatgatttctcccattttgtggtttatctcttcacttttttgattgtttcctttgctgtgttgctttttaactagatgtgattcccatttgtgcatttttgctttggttgcttgtgcttgaggggtattattcaagatttttttttttggggggcctggaccaatgtcctggatggtttttttcaatgttttcttgtgatgctttcatagtatcaggtcttagatttaagtctttagttcattttcatttgatttttgtatgaagcaagagatgggtcaagtttcattcttctgcatatggatatccagttttcccaacacctttattgaagaaatccttttcctcaatgtatgttcttggcacctttgtcaaaaatgagtttactgtatatgtgtggatttgtttctgggttctctgtactgttccattggtctatttctctgtttttatgccaataccatgcttttttggttacaatagccctgtagtataatttgaagtcgggtaatgtgattcctccagttatttttctttatactcaggatagttttggctattctgggtcttttgtgattctgtttaaattttaggattgtcttttttctatttctgtgaagaatgtcattggtatttttataggaatttcactgaatttgtagattgctttgggtagtatggacattttaacaatattggttcttctaatccatacacatggaatatttttcattttttgtgtcctcttcaatttcttttaatttatttattttattattattttactttaagttctgggatacatgtgcagaatgtgcaggtttgtgcaggtatacatgtgccatggtgatttgctgcacctgttaacctgtaatctaggttttaagccccgcatgagttaggtatttgtcctaatcctctccctcccctagtcccccaaccccaacaggccccagtgtgtattgttcccctccctgtgtccatgtgttctcatcattcaactcccacttatgagtaggaacatgaggtgtttggttttctgttcctgtgtcagtttgctgagaatgatggcttccagctttatccatgtccctgcaaaggacgtgatctcattcttttttatggctgtgtagtattccatggtgtatacgtgccacattttctttacccattattcttggttgtcttttttttttactcagcactttgctatattatctgattttctcttggcctataaagtttctactaagaagtctgctggtagctgtattgaaactcctttatatgttatttgtgtattttctcttttgctttcaggatcctgtcttttttatgttttatagtttgattataatatatcttgtggtagtcatttgaatttttcaaagtcctagaaatccaaagatggttgagaaacaactcttgttcaaaaggagcttcaagtcagttgcagaataaatacaaataagtaagataagaaagtggaaacacacaggacagagttatagtagcctttaatttcctcagattctttcaaatctgatttttttaaaggtactgtcagttctattttgcctgaagtgctctctatgttcctagaagttcttggtaaatatttacattgtttactcagaaatctgtggacaggcagagacttgcatgcagaaaagctgaagaaagctcagcatgccacaaaaggtgctcaggtgtccttattgggaggggacaagttgttatattttcatggctttactgagaaatgcctattgcttttggaaatgccatgtggtctgttgcttatatgtaaaaaggaggagaaataatcctaaactttgctcgccttggctgagcaaaaacaaaatagggtagtagacttgtagcctttgaggaattcaaaactaagtttaagtcccagctctgttgtttgctaggtatgtgacctcgagcgtgttacctaattgttcttagtctcaacaaattcaccctacctcaaagggttgttgtgaggattaatacagtttgtaccaaattttaccaaatcagatatattgttttaaatctacattctaaggcccttttagttgtattgaatcagaagctccaagcagggccctgagaaccagcattttaacatatatgccaaatgagttttatcatcaagcaagtcttgaaagcactgaggcagagtatataaagaaccagccagttatccagcactcaggagcaccattagactcctcagtggttactttatcatttaagattgtttttgatgttagcattcaaataagcagtggattatttaggccctaatattgttgacaattagtatagtactcagcacttaagtggttattaatatattaagttgaatcacttaatggaaatttttgtggaacctaagtataggcattatttcagatgctgtagaagagtcaaaatatatatgaactctgatataacctgaagtataaatattatcattaattttcagtagtgcctgaagaagatattcattcaatttgtggtccaaagaaaagttgccatttcaactgaattaagagtaagtggggttatcaaatattgtgttcatttttattattcatacatgcattcatatttgattagtcctatattaaattgaagtaagaatagaataacattttactgtaccttaagaataaaatattatgaaagacaaaattagaaaaaaaaattccacacttggtgtcaagaaacttgatgtaagctgagcactataatcctctctttatgcattatcattttcccagcactctcatcaaactcattttatatattattattatctatttttctcatccagaggaaaccttctcaggaacagatatattttctccttctggagtctagttgatatttccttatccctaaaattccaaacattagggaaggatatgttccatgtaagaagttatcctggtaggggtctcctctttcggctttggagccctcctccctctgtccctgtatgggggagtttcttccttctcccttctcccttcatttgagcctattaaactctctgctcctccactcctaaaacaaacaaacaaacaaacaaacaaacaaaaaacagttatcctggtaacttaataataatttactcaatacaattcccattatgtaaggccatagagaataaaagatgaataaaacattgtcttccttcaacgaatgactgttaaatatcataattaattgtaaataacacaaccaattagcatttaaaaaatactaaatatgttccaagttgtattatatattacatacatttggatactattcctcacaacaattctatgaggttagtactattgttattctcattttacaaatgaaaaaaataaactatattacttatttaaaatcatacaaggttagtagtacaactatgttgttctgttctgtcttgttttgagttcttatatctatttagtgtaatttggagccaaacccttaggaatttctggcgctttcatttattgatagcatgattgggcaagattattgtttctaaactcacttttacttgtataaaatgtggtgaatatgatcttgagaattcttgggtaataaatgacatatgttaggaataaaaatttaaaatcatctagctcagtaactggcacatagttactcatcaaatgttatattttcctttccaattttgataatataataactaatacttcttttgacttccagaatggcaactttaccttattctaatttactgtttttaattattttctgattaacataataataataataataataataataataagtgaactcttactactttctgattgtttttaagatttcatttttatttttggctgtctgcagttttgctaaaaggcacctaggagtgaatttatttttgtttttgttgctttgaatttggtgtgcttcttcatatataaggtttaatttattttcttaatttttaaatttttcaaccattgaagtttttaataatatctctttccctttctcaattatctccttctgattagatataaattgggcttcttattctgtcttggaaatcacaatatttttcatatattagatcacattttgtttgtattttgtattctgcacaatttttaatttaccaattctctttcagatgtgaaaaaaattgcttctcaattcacccactattttgtcattttaaacatatagattttgtacttagtgtcaaattattccatttttattttcaaattctttgtaatttagtctttctatttgttgggtgggctgactcttcctcctggtggagcactttatcatgtagtttatgacttcttattgtgagttcaactttgatagaaactgttttatcagtggtaatttcacttgccatgggttggagaaatatcactagggaataattgcataattgcttcagctgaacattccaaaggtttcacttgtccagaaaagtagttttttacattaatttatcaatataagagatctcatactaaatgggaacagtaagtttggaatacatattcacaggagaaatttgcttgaggattgtaatttccttgaaagactttttaaatttaaagtagaggccatcttatttgttgcttcttaggacaaggtcacaggttttctaattccctttatctaaaggagacattttccagaattcagactttatgcaaggtcacagtttcaaatgtatgatatatctcttatcctcaggtgagcattaaaactccagttttgagttattacggtttatttagttcatatatattagcactagcttataagttgattgatctgccttcaggtgtctgctacatttctttcacccagagatttccaattcttgtgtttgcgctcagctatgtatttaaaatatttatttccacattttgtgcctaatttttatacattggtagtaagacggtcagtcatttatagaagtccatatagtccatattcctgtgttcagtcaacaataaccatttactgagcatctacttcacaaaggtactgaaggtacaatgatgaataaaacagaacaatttcctgtcttaacaaagtttacattcaagtgagagtagacagacaataaacaaataaagaaataatataaatgtcagatgatggtaagtgctattaaataagtaaataaataaaaaagcaatataatggccaggcacggtgtctcatgcttgtaatcccagcactttgggaggccgaggcgagtggatcacctgaggtcaggagtccgagaccagcctggccaacacggtgaaaccctgtctctactaatacaaaaattagccaggcatggtggggggcacctgtagtcccagctacttgggaggctgaggcaggagaatggcttgaacccgggagacggaggttgcagtgagctgagattgcgccactgcactccagcctggcaacagcgagactctgtctaaaaaagagaaaaaaaaaaaaaaaggtaaagaaagaaaagatagcatttgagcaaaggcttaaaaatgtgttaatcatgcacaatatattggagagagaatataccaatgaaagacaacaggtaataaaaacgccttgaggccaaactatgcttattatgttcaagaaacagcaaaaaagatcagtgtggcatatgaagaagacaaagtagtaggaagtgaggttataaaggtactgtggaagttaaaataggtagagcaggcagcacatgtgtgtatcataagacaaagtaagaactggtggtttcattcagaatgagatgagaacccagtggaaaactttgatcaggggaggaaaatgatgtgatttatattttgaaaaggattattttgactgctatataaaaagtacactgtgtctctatcaaagaaatcaaatattgtcaccttgtttgctaagcataaactagagcagaaaaagaatcacttaataaagtttcacatttttagatctgagattattttaaaggatgcaacaatcctcaacaaactagcaaactgaatccagcagcacatcaaaaagttaatacaccgtgataaagcaggctttattcctgggattcaaggctggttcaacatatgcaagtcaataaatgtattcaccacataaacggaattaaatgcaaaaagcttatgatcatctcaatagacatagaaaaaactttgaataaaatccagcatcccttcgtgatgaaaaactctcaacggactaggcatcaaaggaatataactcaaaataataaggttcatatatgataaacctgcagccaacatcatactgaatgggcaaaagctgaaagcattccccttgtgaattggaacaagacaaggatgcccagtttttatttatcagcatctagtactcagttttacaaaagtaagggctcaattttatctgtatatccagaagtcatcatgtttaaagtagcacttcatgttaaactgtttaataagtttttaaatctcagtaaatctcatcacttctcttcaaagccttcccagattcccacaaatattagttagctactctcctggcactttggtcacacattatttatttatattttagcatttaccatgctgaactgtgactgctaatttatgactcttttaactgtttctcccttaaactgtgaactccttgaaggtaggaattatatttgatttatttctgtatctgtaatagcactgtacctgacagtgctctatgaatattcattgacgatatgagtgaatgagtatatagaaacttgatgccaactaattaatctgcagtgagaaatagaggtgctaagctggaagaaaattttattggcaaatttatcttttcagtagaaatgtctactttggaaactaagctataataaaaggattatacaatgagcagaaaattagagcaagggaagtagaatgaccttagccaactaatacctttaagccatggttgccccatggttgtctgtccccactgaagatagactggctgaggaagcagagtcattgccagtagtctgctgacttatcatctcttctgggcagttcttgaggttccaacaaattcttacattttcctcttctttttttcagatactacacatataaatattattcgctctataatacccaccactcctttattggttttgtattgttactttaaaaagttaccacaagcttcatggtataaagcaacacaaatttattatcttacagtttgggatgtcagagtccaaaatggcccttactggactaaaatcaaggtatctgaagggctatgttctgaagccttgagggaagaatcagtttccttgccttttccagcttttagatgaagtttctagaatgttccttggcttatggcctctttgtccatctttaaaaccagaagcatagcatctttaaatttctctccgaagcatagcatccttaaatttctctccgactgtgcttccgtcctyacatatcttttactgactcttttaagaactgagggccgggcgcggtggctcacgcctgtaatcccagcactttgggaggccgaggcgggcggatcacgaggtcaggagatcgagaccatcccggctaaaacggtgaaaccccgtctctactaaaaatacaaaaaattagccgggcgcagtggcgggcgcctgtagtcccagctacttgggaggctgaggcaggagaatggcttgaacccgggaggcggagcttgcagtgagccgagatcccgccactgcactccagcctgggcgacagagctagactccgtctcaaaaaaaaaaaaaagaactgagcctctgtcataacattagagcaaactgtgtaacccagcgtaaactcgccatctcaaggtccttaatttaatcacatctgcaaagccacttctgtcatataaggtaacacagttacaggtttcaggaatttataaccttcaggaatgtggacatttttaggggaactttcttcggcctactacaacccagaaagttaagctaagatgtatgagattgaactataaaatacatcttacatttttttgtttttcattctaatcttgaaaatatacccaagagatttcttgttccccatatgtccttgataaatgcaagctgtattctaaggtgtatgaagatgtcacatttctttttactattgctactattaaataatggtaataatgattaccatttttattgctgaacatattaattctagcctagaaacatcttatcacatttaattccttcaataattctataaggcagatgttggcatccttattttgcaaattaggaacctgatgttgttgagagacatttaaacacttgctcaaagccatttaactagtaaattatanaactggaattaaaattaagtgtctctcattcaatacttgcagtgatttttactaggtctgtagtcccaaatatattacttaaccttgttaagtctcagattgcctaactacaaaaatggagaaagcacttatctcttaggattcttgtgaagacaaatgagatgttacatataatatatgtaagtacttgatgcaatagctagtatacagtatacgctcatagaatgctacttttaatttaaaagctaaaatttacatttcacttattatattatgataccttataccaaatttgtgggaagggtcgcctaccattgttgcattgctacagaactactgattgtttgaaataaataggatacattttaatactactatatcaccagggtcataactgaggtatagaaagattaagtatcatttagaaaggcaccaacgaagctagttctcatgaatccaagtccagtgctcctatccattggcaatttgaactaatttgacgtaaaagaatataaaagagtgaatggaaaacacactattcataatattacatagcaatacgagcaaatatttgtgttatatatagttgtatgcaagtttctgttgggggaagggtatatttgaacttatttgcaaatagatgattcagtcaaagagccatcaagttttagagtcaatatatagatgttgctkctaaaacatggagtcaacacattgactttttatcagctaaaggtcaaactgtcagcttccattgtctatatataatcctctgggtcattacttgtatttctaacaagcactggtgccacatgaaggtttcaatgttaaaaatggctttttaagaaggttagtttaaatgcctagaaaaaaaaaattacacaatttcttactttacttattaatcaactttaggttttagggaaaaaactctgaagatgaaaaagaatgttggcaattaggtcagcacaatctcaggttttatctttgaagtagggcttaaattgtatctttgataaataagtaataaggttttacatgctgaactaaaatatctagtggtaacagcgtttgataataaaagggatgccattaataattgagaattagtaatacccagaatgggttctaataagccaaacacttagtagttaggtaggatttggcattattaatacaaataatcatgtatgtgatttatctgatggaagttaatgtttaagtaagttgttgaaacatttcacccctttgtagaagaggatagtagaaagacaggggcttaaatgtcaaaaaaaatgagtttaaaacttgggctttggtgtacatctctgagctttagttttcttaggtgtaaaattagagtaatattacttcttcatagttcctaaatgagataacacatgtacagtttggtctatagtaattgctcagcaaatggtaacagctatttttgttattattttcaacaataatattaaagctgtgttgggaaaaatatctacatccgtatttcagtgatggacatgacagattttcaaagtcacactccaattcatcagagtgcagtgtagggaaaagaacatagaaatctctgtacacagtgcttgtgaagctaagaaggaataaacattgagaagccacaaaatgtaaagtcgtcattcaaatctgttatgaagttaagaatgatgcagtgatgcttacagggtaatatttcactttcttcactgaggtctagtttttgagtaggtctgggtttttattaaaattctaagacaaatgcatatactgttgaacttgctgactcagacttttcttaaggaccatctatcattttaacttaccaggcaatctagccctggagctggaacatgtggcaagaacagattgccttgttggaaatgagggtagcttggccacagaggtctctcaactcacctgttcctatgaaaatgtctgtggcacactctatggaaagccaagaagcttggtcctaagaaacatgcagcagactacccttccactggaggactgaggggtcctggttagcaggctgtgttagaaacagtttaattttgacattgaattcacctgcttcaaatcatcttcactcatttgttctgatctttatgcatcaacctttccccaaaatgtaatctagggacatttattatgtgtctactctgccaagctcactattaggtctttcacacatagtaactaatttgacccccagacaaccctatgaaatagtattgggtattcagacatgaataaagcagttttcttatcttcgagcgttttcttagtctaccaaaagagaccaatgcaaaggtttattccataagaaattgtattacctcttgctctcacttttccaacagattacacctctgttctataccactaacatttactgctatccttcaaatcattattagaaacaccacttccaggaagatttttagaatgtattacaagagaatctcttcagtcccacttagcatagtcagtttttgttagttctctatttttcttttcctttctgtctattctaattaggcacttatccctgaccttcttctccatgtagcatttcctctggaaatatgagtgatgatgcatttactttattgtccagatttttattagttttgatttttgttttctttttctccccttgcatatttgcctacttctatgccttccattttaaaaagtaagatccttaaagggctggataatctgtagacctacatagtgaaataagtaaacactcactagaaagtgttcagagaattttaagaaaataacctgggctgtcgtgaaatggttctcctgtaatgccagcactttgggaggctgaggcaggtggatcatgtcaggccaggagttcgaaattagcctggtcaacatggtgaaacaccatctctactaaaaaatacaaaaaattagccaggtatggtggcgggaccctgtagtcccagctacttgggaagctgaataacgagaatcgcttgtacctgggagatggaggctgcagtgagccgagattgagacactgcacttagcctgggtgacagcatgagactctgtatagaaagaaagaaagaaagaaagaaagaaagaaagaaagaaagaaagaaagaaagaaagaaagaaagaaagaaagaaagaaagaaagaaggaaggaaggaagcgaaggaaggaaggaaggaaggaaggataggaaggaaggaaggaaagaaagaaggaaggaaggagagagagagagagagagaaagagagagaaagagagagagagagaaaggaaggaaggaaggaaagaaaggagaaagagagaaagagagaaagacagagagagtgagaaagaaaggaaggaaggaaggaaggaaaaagaaaagaaaaaaagaaaagaaaagaaaggcaaagaaaaggaatctgaaatggagtaattgtatgtcctcattttacagatgaaactgcaaagtggggtgtacagcccaaggttcacagcattgcttgggggaaaaagcaggatgtgaaactagaagtcttctgggcatcagtatatttaaagcttaaaaaaaaatcctctacccttattcacatggtttttctactatatcatttattttcctttaacaaattactcttttggtggcttgatcagataattatatcataccattgaagataattttggaactaaaatgtaatttagagaacattaatccattttttttcattatagagaataatctactttatatttgcattgtactggaaagtttacagtaagctgcatatacctgactgtttctcacaaaatctcaacgatgtaagcaaagtatttgtattctaattccataatgggtaataaattttttcttcttttttttagacggagtctcggctctgtcacccaggctggagtgcattagcacgatctcagctcactccaccgtccatcttcccgggttcaagcaattttcctgcctcagcctctggagtatctaggactacaggcatgcaccactatgcctggctaatatttgtatttttagtcaagacgggttttcgccatgttggccaggctggtctcgaactactgacctcaggtgatccacctgccttggcctcccaaagtgctgggattacaggcatgagccactgagcctggcctactatttcttatgtaaacatttcagaatctacttaggaaataagtgaccgtttgtataatttgaagttcttcataattaaaagcttaaaatataagttttatatttggaagcttatattccccatattggagtagttgggtgggaagaagtataagagtagaaaaatccacatccttctattactaccttctgtttgacaacctattatgagtcaaacaacaaaggaaactgagttcaggggatggggtatgtgcacttgtcaaaaaccatattgtttaaagtcaggtgagccaaattcaacatataatcaactttttttcatataagtgagaattattgtagggtccttgacaatatatttgtgaattgccatataaaatatcacctggataaggaaataagaatttttgaactgttttagggtgagtttctctctgcatagaaaaattggttagcatgagacatgatctcaatatttatactacactgtgttgggatccattactttttaaattatctatctggtttctgatcccagtgtaccttggaccttgagatttgagggcattgatgccttcacatatcttctacttttttgtctccaattcaaaacagggacacttcctagatgctctggagctctgaaatgctggtgtcctatcctgccttaggcaaagtgaatttaggtgacgaaagctagattacacttcctagccagattatagagaatgcaaggatgagaaaatgctctgaatagatagatgttaggcagtttcttctatcaagaccccaggtgatttacttgcctgtggttgaacctagttttataatgttttcattgattctttaagctatcaaattctccagcagtagatttattttttccttaatttagtcaaagccatttgttgtttgctttttttttttttttcttgcaaccaaataaccttggctgagacatcatctgtgtgtaaatagagtctgtagcatgcctgggtgacaactgtcatttatcccttccagctatctaatcaggagagaattgagctcacaggagaatgttcttcctccaacatgttttttataaccaccctgtctaatggtacctttccaactcgctctatcatacgaccatgtttattttattttctttatcacaacctgatattgctttgtttgtttatttttacttgtgtctttccttcctgaatgtattctccttgagagcatggatcttgtctatttttttcatctccgtatctccagaaaaataatacaattcttgacatgtagatcatcagtaattattttaaataaatgaatagataaatgaatgagtgaatggataatcttgcccatgatcagacaacttctcaggggcatagaatggatttagacggaagtaacctgactctagtgtctacaatcttacctcctatgccagacaagcagatataatttaaaattaagtgcttaatctatgtgtgagcatatatgcatgtgtgtgcatgtgagagagagagagagagaggaaggaatatatagagagagaaacagagagagacagaaagagagaacagtgaaaaaaatgtaagtatctgctttgatctgctaacctggcaaatatttatatttagtgtcaagctaagacttttaagtaaagtaaaaactgttaatctttgcattatatttgagccagtaaagcattttcatccaagatatccattaagatggcaagtatcttttagtttagtatagcagttttggcattgttatgaatctgtagattatgcagagcttcccacttgtaatatatatagcacaatacttatgtgttagcacctctttagagtaaaggtcatgggatagggttgtaaaaagtgtgaagtttctgagtcctgtgcaaatttgagctactaaattgttactaccatgttgtttattaaatagctcttcaatctgaaatctgccattatcagggattatgttaggcacttaatatctcatctaatccttgtaacagccctatgaagcagacattacaattcagtyttatagaggagaaaagtgagtttcaaaaagtttaagtaaattatctaggtagtgtctcagagctggaatttcacatcagatttgatattccctacttcagctcttaaccacttaattatgtttggaagatgttaaaattattgcaaaagaacatcctttatgtttaaacaagttactaagaattaaacaataggtaagaatccagcagcctggggctaagaagcataaactgtaggttctaggtgcagctttgaccctatgtgtctaagcaactcatccttcagtgtattggacaaaagcactgtacctggccctcacacctcacatacctgcatccaaccccagtctcagtatttactttctctgttaccttgtacaaatcagtttatttgtaattgattttgttacaaataagttttttgatattgtaaagaaaataatacctgacatgtggggattaagaaagataatatataagagagtgttttgaaaactctgtaatgctctaagaatgctaggaagtaagatttgtaggcaatggctgcctcagcacttcatagatatcatttttttaaagtagggtttcttttggcacaagattactgctttgctgtttcagccaaaacttctatttacacccagtgtttttgttttgtttttattttttggttttgagttgtagttttagcatattatttaggtgattataattgatgatatttgtatctgtggctgttttcttaagagaaccttagaatgtggtaagaattttgttgttggtggtgggggtggtggtgacatctcagttagaagatgggttccattaggacggtgattgtgacttattcatctgcttcccctgaacccacatgcttcgcctggcatccagtcagctccctgtcattggattgactgaataagtaagtacttattacatagtgtctttgcatctcagtttcttactcatcatggattaaaatagaaacacaatgtaggcatttctgagaatttagcccaaacctaggaaatgttgactatcatgccaaaatactttataaactactcattgttgcctatcactagttatctcttttcgtttttgtgccagaaaacacactacatggatagataggcggtgactatcccagtttccactccaatgagcaagtctccctttggaaacaatctgtggaaagctgtcatgtagaaaattattgccctttcatgtgtacttggtagtcatttgctttcttaccatgagtgcctgggttctgtcctctagtgtatcgtgtatcttgattgccagttggttacaagccatagctcaatcagtggataccttttaatgtctccttccttgaaacctatgtggctgcctactgtcagatcaaggtaatgcggatctgtgccaggcatgaaaagaactgacattcagtggaggtataacggcatgtgaatgtcattgataagagatgattagttattttaatttccatggaggttgacatacttcattatgcaaaataataaacatgttttatatgaattccatggttcccaaactcatgacatgagaattctaatttgtattatgtgagccatgcagaggacaaataagcttataattttgcttgaattaatatttcagaggtttcygcagggatctcctttggaggtaacagtatgttcccaggagagtctaatggccttatgaatctctaatcctcatcccctatctctcttagaaaaaagattgtctttctgattggatagtgggatatatactcacatttaggatgcttcaagtagagtcccaactctgggactatagggtccatagggtacagttgtagtagcaataatctaatattgggagagctcagaacaagctccagctctcctacttacttagctaagtgacttcaggcaaattatttaatgtcttaacaacctcagatttcatataataaaattgaatatctaaattcctctgaaatcccataacaatttatttgtatctctcctatgggaagagggaggaagggacactaatattaattgaacatcttatatgtgcaaaccttgtgctaaacattttccatgtttgttaatctacatgacagagttaaacgccattatctatttgtttaattagtgaggccagtgggagtcagagtttaagttcttatgcgagaccagagaattggtcagataatgaagggaaaaggcaaacctaaattcctggctacctcttaacctattattctctgtaatttcctgattatggcatatttcacttcctacttcatattaagtaaatagaatgaagtatattccttcattcaaaaattgtcagttttttaccatgtccagatactgctctgaaaatttaaaatacagtatgaggctaattaaagtcacatttcacatggggcttcctttttattccagtgaaccgtgaaccgtgaggaaacaaaataagataacataaataaaaatgctttggaaatcatgtaatactaaataaattttaaggattattttttatatatataaaagttttcccctggatgggctttggacatttttcaataaaaagtcttttactttctccttatattacaataatgcagttgctgaataaaaatgttcttgttggaaaaagcaacaatcagttcaacaatcttgcctccattaatcagattctaaggaatttagtacagtgcctggcatgacatatgcacaccataaaagttatgatcattgatttctaaggttaaagccatctatctgtagtccattcatgtagcaggcacaaaatataacaaccagtagcagtggttgggaactaagcactctaactcagatgctttgtctctctgaaaacacacagagctcaccccaagctatatgataacacatttctcagaatgcagtagtcattgttcatcagcgagttctgaacctcattcaaagcaggtttctttcctggcaattaagtaaacatgaaactggatgaaaagataattaactttgaggttcacgatggtggtacattctgaactttgatgccttcatccacccaggaacttttagtgaacttattgcctatgatgaaccagaatattctctccacctacacacagctgctcagttcagcttagctcactccagcttagatgcctggtggtactcaagaagacaggatataatgaccttcttggtcccatcttttacctgagtcccacgtggaaactcagccctgctctggacctgaaagccaccacaagtggggagaaattgagaagcattcattctgtggttcagtggaatcaacatgttcctctgacattgtgcccgtttaccgcccttcatttattcttcaaacatacgtggatcacctaytgtgtaccacatttgcttcagtgagcaaagctgaatccatgacttcacagagcttggagaatagtagggaggccacataattagaggtcatttctgcccagtgttcatatggttagtgttaatgcagggataagcataagttattatggaagcacagagaagagaatgatatacagtttgagggcaaccagagttttcccaaaatagatgataactgaggtgacatcatttattcttttgtttattcaacaaatatttattgaaggcatagcagtggctgttcaggtaactaatgacctggtgataaaatgaataagacccagtcctttttcttatgaagaggagacatacatgtaaaatgttataaatttgaaggtagttttgaatgtcttgaaggaaaataaggcaaaaaaaggggaaatgatggtttatacttgtgctctgaatagtatgacacatttatgtcagagcagtcagatcgtgcttccctaactcttaggtgatatgttgagctgagacttgaggaaaatgagagagcaggttaatcaaatatctaggcacaggaaccccaaagcacaaggactttgaggcagtagtagttcctgtgtcagagaaatagcaagaatgaccaagatgagagcaagtagtaggaaatgaggtcacagatggttttagggacagattatataagtacgatggtaattcaaatgaaaaatgttagaaattttgagcaaatgagcgacacaactggtttatgtttaaatgggtgtgtgtatgtgggtgagcttgtgtgtaggtgtgagcatgtgtgtatgcttctgtctctatgtcatttcccatggtgtttgaagcacaggaaagtgataagagaaaaatgtgaaaagctaaataatttgagaatgattcttgggacaatgcaaagtcactgatgggttttaaaacgagaaactgaaaattggtaaaattggggcagggaggctccttttggaagatgttgcagcaagtcaacttggctcccaggtattttcagggattcctctgtacacctcatccaacacttagatcctgtggctttgcatagctcttgcttcttctagtcatgctttagggtctgctactcactgcctagtacagctgaagctcacccctggctataataaatgctttcctctggtcctctttcctgaaaccatgtttatctatcagtcattactacttccggaccccttggaattttgctcacacagatcaccagcccaggctacagcccactacctgacatagtcctgactctatcttctccatctgcctgggtcagttttcatgaacatgctcctctctgctgggagtggcccaaggccctgggtctctggccagtctctaagcagctactctcaggggaagaaagtcttagattttaacattctactttcaggtaaaaagtatgtcctagacaaaagtagtatttgttttcaccctcatgttgagagcacttttcacctcctttctttctcttcccccagtcagcaggtgcacagtggttcaagccaaaggcatgggcagcatattctttccgattaagagctaagaagcacatgtattatctttgctttttcttgaccacacacaagaaatgtttgccttttgtaaagggatcctgcaaagagattgaagggagaatatacagataagttgtcagtctttaatgatgggtattgaaacatataagaggcagataattttgagcatataagtcttctctgtcttttatgtgccatgacacttgtccctactgcctaccctgtctgcttttaaaccacctcacttacatcaactgaatccattcatggatctatctatgttacactatgacaaagctcttaaaaattcctcattaattctacctggggccaagatacttacctcagcaaaaatgaacctttcagatggcatgttcctgataaaattattgaagagatgtgaagtatcactagtttttttaacatcctttttttgagtgcctattatatgccagccattgttctaagcactttgtatacattatcagggacctataaaagtagagattattatcctcattttacagttgaaagccccatcacatcctaaatgagcctgtgtaatcttgctcaccaggccatctcagagctatgtgagtggtggagttgggatttgaatcaagtttgagtgactccagtgcctgctcactgtttatgtagagatgaacaccttgaggggtcatttttctgactactacagtatccaaggacctgagcaatgtgtgatgcataaaaatgctcccaaaataggagctattattatgattcaggcaggggctggytggagaggatgggaagggggtggaatgggtggagagagtttatgggtgactaggaggagagttgccaaacacaccaattacaaaacccaccactacttatatttagataarcagagactgatcattgtctttgttctgcttagcaaaactaatttcactgcttggtgatggcaaattattttcaagcaggtggtaaaatttatcaagaatctgagcctctgccaaaagtaaaactacccaatgagtcagtagtaatcagctggatgatatttgaatctgacctgataaatccaccatcacaccatgtccccaagctgatggacatacaccatgtccccaagctgatggacacttcaggtagaaaaggaaacgtgactgtaaatcatgtcttgtcatcccatcttatctcatattgtccaccattattctacactcttctttcccatacccaatggccatttcattttaagatcatagaaaaactgttccttttatcaaaacatcaggaacctgaccattagaaatatgatattattatataagcatgcctttaaaaagttggtatcccctgggaattatatataattcctttggtctgatggttaaaactgtctattggaacttaagtgcaaaatcacaagacactccatttaaaacagtacttctcaacctaaagtttccaagcctgctacacttcttgaatccagtaatcataaagatgacataataataatgatggtgattgtggttaggatgatgatgaggatgacaaaaacagcaactaacacttactaaatatgctaggtgttgcactacgcattttacattcattattctactcttcacattacttctgtgagttatatgtgattattttctttattatacagctgaggaacctgaggtttagagaagctaaatatattgtgtaaggtctcacagacattagatgatagaatcagtattcaaactctaatttacctgctacaaagcctcagtccttaattgtgctactttaaatatatcagaaagcctaatccagtagaacattggctctacaaaagcctgtgcattctaaagaaagaaagctggagttatatcacccactctactgacaatgatttgcttggactgattagaagcttgtcttgattattccacatatacttgaatgtagttaaamaaatcaaatcatcactgattatatgcagttagcttggcagaaaaattcttcagaacatagattctatggggtaaaataattttaaaaacccttttattcatactagaacagttggtgcctctcttcttaagtgtaacatatttcagcctgaaaagtcttaaatttatatctctcatgtataaaattaaatcaacactctattttataaattctgttcggtcataattttttacctcatgtttacttaaaatgtctttttaaaagcctctagaatgtaacaatccttgttatttttagcaacaatctctacaatgcaatgggaaagtaacacactttccttttataggagataaagtcaaaagattgaaatgtgaatgtggatcttgggaaaggagcttaatcaatgaccgggccacaccaccagggaaagtgtattaggtaaaacacatgtttaacattcacagtgtgagcattttagagaggaatgtagcaagaaaaaagatttctgtaatttttaaaaaccatggaacttgactgcaagtggaagttggaaatgtgtttagaactttgaggtaggcactatcagctatgagcagaactgccacttgctttgaccatctaaaatggtctatagaatacttcttaaaattggtttcttaatggcagctgtgttcaccatattagaaacccagttagaacaaacaaggatgtggtcatacaattatcttccttctctgtcctagaaaatgcgtccatcttggtaactgtatgtattagtctgtttgcacgttgctgataaagacatacccaagactgggcaatttacagaaggaagaggtttaatttgacttacagttctacctggctggcgaggccccacaatcatggcagaaggcaaggaggagcaagtcacatcttacgtggatggcggcaggcaratagagtttgtgcaggaaaactcccccttataataaccatcagatcttatgagacttactcactgtcaagagaacagcacgagaaagacctgcccctgattcacttatctcccaccaggtccgtcccacaatacgtgggaattcaagatgaaatttgggtggggacacagccaaaccatatcaccatacctggcttccgatttcccctgactttggcaatgtgctctgacattctacctcttcctattatttagattttatgttggggagtggttctggcatccttcttgatttcatactctagctctaccactaactctgagatgacctaggtaaatgtcttaacctctttatcctcaatttcacaatatcccatatgaagataatgcactggagagctagtgagaattaaatatggtaacacacatatgcacacacacacacacacacacacgcaaccattcagatctgttagaatgggattttttagttgtcattattcctactctccagaactctagaaaatagaggatgtcaaaacaagaaaactgggcaccatttggttccattgggttttgatgtactcataggttcatatgtttcttatccttctcaggcaattctcattgcttttaccaaaacacatttagatctaattattaaatctgtcgggktttttttttttttttttgctcatatatgtgtgtgtgtgtattcctgttgaccaacagctagttgttattctgcttgtttctgtcaagacatcaatagcctatttccagggaccaaaaattaaatctccgctgagagtcatcaagacctatgattaaacagaggccagtaagttattaaaccagggctcagttttcctgagcttttcacataaggatattgttcaatcagccctgccagctgtccagaccttggtacttttacaataatggaatttagaagctgggaatttcatcttttctactgaatccaagctaaaacctttctggtttaaaggaacttgtaaaagcatacctccaactgtattaaagcatttccatttgtggaacttgaaactattaaccagatgtcttaggcactttagtaatacaatcttacttaatcctcacaacagtgctgtaagatagctgctattatttccattttacagatgagaaagctgagggctaaggaactttcctttcccagcatcaaagatctgttaaatcatagagctgggaatgagcttgtgttcttgctaaccactgaatgtcctgatttctcgatatttgttaatgattaccttttaaataatcattcttaatagcattcattcaaacacttctgaaaatatcttctttttttctatttttcttttggtacttcctcttcctcctcttcctctctttttaactttttctgcctcttttttctcctttttcttccctatttctcctctaccatatcatcttctttcttatagtcctccggcaaaaataattccaagacatgatagaatatatgaaattttacatagaaaagatactttgaatatggatgattaggaagggtttcatggaggaattaaattttgaggtgaacattaaaggtcatgttgcatttggatgcatggaaaagtccatgtaaatcaatctagaaagaaggaataatacgaatacaagcatcataaaggcatataatgtgagatcctggagccagcgttttgctttggttgaaatgaaggccaactgacataaattattaggagctaggtttgtataataaaatggggacaggttgaggagaacatggtatatcaatgggaagggtataacctttactttgtagactatggagagctataggatatttttgagtcctaagggactgtgtgttcctttcactggaagcagggaatggagtgtttagtgggatatatttcagaaacacatttttaaataggaatagtagatggtttaggaagaaaaataagtgataatggtcaaaaagcagttagtgtacaaataaagttgcctatactaaaatgtagaagaaagatgaaccaccattatccttcggaacataaataatcagtgctgagactaaagacagataatacctaataaaaggaaaaatactgcagtgccgtttgttttatactatcataaactttgaagtgactttatcccttaagtcccaaacataaagccatgcaggggatgaatctgtattatagaaagaaaaaaaagagagacagaacaactaatttgagtcctctctattatctattaggtttacaatattatgtgaaattattcagtatttctgagccttaagcactgatactattatgaacacttgagcagttgtggtgagttagatctcatctttgaatattccagtgaatataccttacctgaatactcttgaagagaggcagcacatctttatgccccaggtgacatttagtttattggatcaattctacaaatatttaacatttatttaggtgtacagtcacagacctttaaaagttacagataaactacagtatttattagttttaccaggtcttttgaaaatctgcagtcatctttcttcacctcgtataggaatctagtccctttaagcttacttggtgtgaaaggcatcttttacatagccaccactcctttggattctagcccattttctggctcagaagcagtgaggtggtgatggggaagcagagtaagctgtcttgcaagtgtccttaactatggaaaatgcagggtgctggtcacacataagagagcagtttaaataggaatacatacaaatctcagggctaaggaaggggatccttctgttggatgagtcacagcttggaaaacctatacccaacagcaaagaggctaacttggctcagttggcaaagctcccatgcagcaagatgactttgaccatggccatcaactaaggccttccccaattccaacaagatctggaggtcatcttaccatccttacccgaactttattctcctaccacctcccaggattcctttccagtgaagtcactgggcacttggggcctcctgtttctctattgtctttccacgtctattggtatgatacaactcttttttctctgatcttctctttgactttcaacaggttgttttctaattctaaaaactaaactgcctctttctcccaatttgagtttcctttggttgttatcaacacctaaagcaggattctgaggggcaatgctggaagtttctttcagtaaagtgagagaaagagaacacaaagattaaagatagtatgtcttgagctttacaattattttttactctgtcattcaaattcatctctaatttgatccaattctacctctgatccatgaatactttgtctccaataaaatgggattatcttcctgaaatacattaggtgctttttccttccgtatttgttcacatggaatgtactcccactttcgccccaactggttcttcacctttttcttcacctgttgaaatcctcctgtttttcaatgccattttagtggtacttccttggtgaagccttcctcatttttcccagctgtgtcctttacacaatccccatggtttttcttaattatcttctggctgaacctcagtatagttatctctgtatttctcttaacattcttactagcttttgagcatcctaaaggctggagtagtatgttactgtatcttacagaacttacagtatctttcacaatacctttatttagaaaggattgaattaaaaagttttcataaaatacctaagttattaggacattctgaagtgagtaaactttatattattttagaactttggcaacaaaaatacatctgactctttccccttgatgaccatcagctatatacccagagagatttttctgttactctattctttttgagatttttatgccaataaatattaattcttatgaaacaatatttatagtggctaaattttatcaagcattttatttaagctaggcactgtgttaagtatttttacattaatgataattttataaacactgagtttatggtttatcttgaattacaagatgagtttgtcatcggtactcatatatttagaaccaagtaaacaaattataactttcagataaacacagactctgaaaaaaagactaataattgttgattaatcattctgtaccttttcccatagtttttcttttggtttttggttgcctaagcaactaggtaaaataagttaactatgaccgctagacatttctcctgaaaacaaagtttctatgtaagttttcctattacactcacttccaattttgggtagtagatgtcttaccattatttttgttggccttctcaggtcagagtaagaagaatctatatcctccttctagaatgtcttatacatgcattatatcttcaatttatcaagaggcacatttttttgctagcaacatactcagagccagggtcttgaatatctttatatgttcaatgtttgatacaggagtatcaaataactattgagctattgaatgcatgtataattagaaagatatttcactcccttgtcttggggtagctgattttttaagccaatgatgaggaaatttattagtggctgatacatacattactccaagaacattcataggactttttcctgcatttgctcgaaagacttttcaccttcttttctgtttctgagagtaaaaagtgtcatttgaggcagattttcacacctatttccaatagaaggaaatcatcttgtcactcgcataaacatgtaaataattaatatgtggttcacatcaccctgcaactttgggacttaaacttgtactactaggaagaacctaaagaaaaagcagaatcagtaacttcatttggcctaggtggtcagctcaaagagggctccaactttggataatttaatcagaggagaaaaatgatgatttattccaaccaagtctaaccaaaacctaacccactctgtgttaaatctgtttgggacagatgaacttatggatcataatcttcaaaaatttaaggtgcttgagccttgctaaaggtctcttagagggcctactcacagataatacttttgtcactcaaccctttattgagatctacctcatttatagagatagggaaggcatgacaaagacaatgaggctatccccatctgccactccacattactaggtccccttataggtgacaggggtatataattagttctgaccaatagattgtggaaaaaggcatatgtgtctctcccagatcgaagcacagaaatgtcaggttgccttccctctaccattctctttcctgacaccgggatcaaggagacctcatgttttagatggtatagctacaaaatgtggtgtgttagtctagatccttgaatgactatatagatcagagtgccctaacctgcartgagtgagaactagcctttgtattattaagctactgagatttcaggtttactgcattcttacaacaaacctaacctaaccagattaacacaaaataataaaagaaacaggaagagaattaacatttaatgagtacccaattatatgcctacactacagtaggaccttcatatggtctgctgtttctgctgttgatgtatttacttctcacaaaacctttatcaagtttggaggaaccagatggcaccgaaaaacacaggcaaatgatgtggaatctatattcacaattgctttgatcctgtctcttctgtagtgccatatctgtcttaaagcagaaatattatagacctgtcttctgagagccatacatattgactacttatttaagcaagattatattgattagttcaatgaccacagagtcagggaaaaccattttggaatgagttcagtaaatttgtgtcaaatgcttattcaattatcatcctttagagttatttgggggtttcttataaattgttacacatgactcactttggctctgtaggaattatgttatttagtctcattattgggtattgtttgttattgctaatgaataaaatcaaaaatagaaatattatatattcaaagtatatcaaactaagtaccatagagaaggggtaaatagggacatttttaccaaatcattgcatacaggaggctcttttagctgatttaggaacatccaattaaattctttactgtgtaaagacctctggacctagaatacctgaattgaaattctggctccatgttagctgtgcaatcaattacttaagcaagccacaggtgtatcatctctaaattgaggatggattaaatttaccttacatggcttttatgaaaattatgaagttgtatttgtataaaagcatttgtggtctggtgtatagtagatgtacaataaagtgttagagactcagtttgccatttaaaatgcatagaatattaagaccccagtaggttattcaaatttaaaacatcagtgactactgttaactcttctaataaacagatgtggacatgggttagatgtggtcagaaagagccacgtgacttgaaagattattcaaatgggagagtttcctttttgaacttatcaagctccaggatcaagctttttattttgcaagttcaaaaactcttaatttgccaacatcccagagccagtcgaaattggggatattgcttcataatagtaaagcttacaagatactgctggagatgaatagatacttactagagtttattaattttaatgcaaaaaagtttctaagctgactaaatgtccatatactctaaccagttcattatcccttagtacagaaattataaagggagccaaatgataaccctcagcttacctgtgtctgagtaggctagcttaatccagttcagataaccacaaaatctcagtatccttaaattctaagatggatttatctctcaaacgttgtgtccacagtgagtggtgagtatctggctctaagacatcttcacttaggagctcaagatgatagagggtgtacttcatgaaattgtttcagcaaggggaaaggaataatgaaggatcttacactagcttttacaatcatccaccaagaagtgacatatgttgcttaaactcacattcattggctaaagtaaatatctatttacttgctatacctaaattgctatacctaagtttaaggaggtgaggtgcaaccatctcttgtaccccacagtagagaggaagtggatattggtgaatatacctggtgaccatacttggtctgaagtctaatgacctcatggtctgactcctgctgtccctctagcaacataaagaatgtaattgccagatgcctatactctcataaagatctattggtaaggccaatagaatagagggaatagagctatgacatgcactgccagacactgtctcagagactccttgcctctggcaagagttggttgcctcactggccaacgaactctccattgcataggtatattctttccttagatccattaatgaactcaattaggcggcattcaggtcttgttgacctggaaacccttctacctctttcagatgatttacataattctgaaggtaatattattttcttcattttgcaattcaaaagtacctaactgcttttcctcccctccatccaccctcttcctacagatttaaaaaggtttttggataaactcgtaacgataccttatttcaattaagagtgtttggaggagctcaggtcctcttcttacttaatgtgtggttttttatgctattaattgtatcagaacgacagtgcaaaaagtagtttcagcttcctcatttgtccagcattaagtttctttctgcttacagagactaattgtaagcagggtttaattttttttttttttttttttgaggcggagtctggctctgttgcacaggctggagtgcaatggcatgatccaggctcactgcaaccccatctcccgggctcaagggattcttctgccttagcctcccaagtagctgggattacaggcacccgccatcatgcctgcctaatttttgtatttttgtagagacggggtttcactaggttggccaggctggtcttgaactcctgacctcaggtgatgagcccgcctcggcctcccaaagtgctgggattacaggtgtgagccaccgtgcccaggcagtttaattgtaatttaatcatcacatgcagatgtcgttctttatgtattccttaatgaataatgaccatttgtttccaggttatatgagtccaaagaattgagtgagttttacattgaatgcttttgtctctataagtttattatatattctctggcctaatgtttgaacagttctctatttgacaaccatagtcaacatttttctcctccactaaaatattttggcaaatattttccccaaatcagagaaggaatttactcatttaattttttgttacccattgttcattcattccattcatcttcatttattcagacattcagcagtcttaaaacacctattattttcacttactaagtcataaactttgggaagcaaactaggaataagataatatttgggctctcaaaggacttcatctttggggaaaaatagaaagacatgggcccaaataatatgaagcagtgtgctgttgtttggaactaccaaaattcagggttttaccatgcttaggcattatattagatttattcttcaacatttacaaagtactttctcattaatgatcttgtgtaacctctcaacagttctgtgggagatcgtgttaccacccttttacagatgaggcaatacaaagttaaggagcttgctcaaggttttattattattaactgacataatcaatgttttcaaaaatgttctcatactataggccctttttaagtcctgcacctgcaacatttttgatcatggatttctaactagttgttttgcctggatcctttgacactaacaagttatgagaataccaagacattcttggtgaaagattacttccatgaggctatattatagaaataaagaaccaatgtttgcttggcaagcagctgctttaaagaattcttatctgggttacctatgcatttattcttttttgcttatttagctttttaaaaagaagattcttgttttgttttgttttgttgcaattctcttttcaggagaatagatagcttgcattacctgcagaaatgtatttatctatattttgttgctcagcttaaagagaaaatattagaagtatgctggaaatagatatcttttataaataaaggtaaagaaaaatagataatttaatgcaatgtaatagaaaagtttgctgaagtaaagatatcggagaaagggactgctgaatatgcacataaaactttgaggacagacctagatgagtttgttgaagtccctgtctgatcctgagttttgtaaaaacaattcaatgcatttgggtggagcattcatgttactacacactgaggcaaggaagttgcagtacgacattttactggctctcaaagttgttgcagtttcatgggggaaagagaaacataagcaattttgatagaatgcagaaaatgctatrtttgacttattgggtgttttgggagcagagggcacagagctagaaacaaagccagagttggaagggtggactgaggtttagggatagtttggagaaaaatgagagaaggctttttagtagaagccacttctgaagacattgtgggtaaaaatgatgttgactaycatccactgggtaattatatgtgtgatactacgtatggcccttcacatgaattacctcatataattctcttcagtgttctgtgagataagtactactattttctcattttacaggtgataaggccaagcaagacaagagaggaaatagcaacatttacctcagatrgcctctgatagaactctgggcaagaggcctctgggtaaaagaagactcagcagaagagatctaatgatgcagagttgaaagataatcagggataaagcaaaaaatagggcaagataaacatgatatggtgtttgaaaataatctgttaaggaataaaataccaaataaaaaaagacaactagaaaccacaggaatagtaaacatccatatgatagacaaaatattaataatagcaggtactgttcattgagcgctaacagtatcctaggccttgttctatgtattttcctatattatctcttttgagtctcaattctagagggagttattattatccttatttataaatgagattactgggccaggcacagtggctcacacctgtaatcccagcactttgggaggccgaggtgggcagaccacctgaggtaaggagttccagatcagcctggccaacatcgtgaaatcccgtctctactaaaaatacaaaaatcaaccaggcatagtggcgtatgcctgtagtcccagctactcaggaggctgagacaggagaatcgcttgaacccgggaggtgagatcatgygattgcactccagcctgagcagcagagtgagaccccatctcaaaaaaaaaaaaaaaaagaaamcccccaagaaacaaaaaccaaacaagcaaacaaacaaacaaaaaacgaatactgatgggccaaagagactagataaatatttcagtctcacagtaagaagaagagctggattttgagcccagaaattctgactccaaaacccaggcatttcttcataccaataatgggattagcacagtgtataccatttttttctttctttttttctttttttgtaaaacttatgttttagttatatctttctgaaactagattccatattctgtgaaggaattatctacagggccagctcttcttatctgatttgggaagtatattttcttctacataaagatggctaatctcattcactgcctgtttcgctgatgcaactctcaaggattaaacagtcttatccctaaaacgtgggggattactgcagctccatacatactgacacctctcatgagcctcagaaagtcactcactcgtttgcctttttagataaggcaaaacagtataatgatggctaacgactcatgggtaaaggaaacaacttmaagattttggggttctcaagattaaaagaaattaaaataatagatttccatattgttttcaggttgctaaggagtgtaatgaaggcctatttaaaatcactgtcattctgcacagcatgaccatgaaataatatgacgagaagaatgtaagcaaaacatttcttaagagtctgagtttttatgaaatatacatatttaagaaacaagggaaataaagttctaagatactagtaaaggaatgagaaaaggaggatacattttaacagcaaactaatgtttgctatttttgtcccttaagtgccaatatcttgcttctccctgagataaataattgcttctctttatggcaattatggaacaacatttcagtttattatattttttagtaggttgaatggtcataatgtagtttcctttaaactaagtcttcctacctattatactgaagctccaaataattgtaaattttaaatttttcatggcatcaattaaaaatatatttttttctaatgcctgtctttggttaacatatgttcctactgttccttttgcatgtgttctacttttccattataatatatggctatctacttaagcctagtttaaatttgtaagggattatatttcaaaaataatttaaggacaaatcatctgttggattaagaatttcttgcaggaaggaaacatattgtcttaaagttttatttttaggccttggtaggccctcagaatatatattagaggaataagaaaattaattgattagaaataatatgattttattgaattatatctgaacaagagtaagatggaataaaggaaagaagaaatccaactcagaaaaggtatattagacagagccttcacgtcaccatctgaggactcattttggcttctcttgactcaaacctaagagaaatagtttgtaccagttaagggtatttatctaattttactggtagtgaaacaaattactgcaaaaatgaaagaattatttccaagaacaatccaagttttatagtgttcctaaaatattgatgaagggcaaagagtaatgggtgtttaaatgatgtrtgaggcttagaaatatatgtcatcattattaaagaagtcacttttcctctgttatgagcaaacagtacagtgaagattttccagcaagattgtcattttatgtaccatggttcttatttcttagaattataatggactaaaggagtagtattttaccaggtcacaaataatgtaacacctatgcctattaaaactcttcatttatgtggcaaagcacctaagccagttattctgattttattgttatgcaaagaagatgccttacacaaatcatcttttatacgtcaaagattctagttttgggattcaggaaatctgggttcagcttaagcctagatttttactagctgacaggccttaatctcttttgacactttgtgttgaaaaaaatatacatagttatataactgtgttttaaagaccattctttctagtcccggcattaactctggttctgtaagattttgartagatcatttactctacagggtttccttctgttatcaaaattagattattatcttctcatccagaagttctactctcagggatttatccaaaggtaaactatgaagagatttatgcataaggatgttcatatgtagtattatttacactagaaaaaatgtaaacaacctgcatccctacaaatagggattggtttaattatagtataatcatgcattagaattatatgctgccgatgaaattgatggatacattttaattaacatggattatcatagggcataaaagaaggctacaaagaaaatgtatagtatgattttattttttaaaactatatttgagcaatgtggatagaaaaataattgtttattgtgtactgtgtttcaaacactactgtaaacacattataagtatcatctcatttatataagactctaacaggcattgctattaagcttttttatattaaacaaattgagccactgtgacatgctgcctcctaagaaatttgtaataatgaacaatgcactgttaacagtgtgcatctattaacctcttttattaagtacatagaggtttagagaggctaagagcatgagctcttgtcttatctttgcatttactagctgtgtgactttggagtttcttgacctctctgtgcctcggattcctcatttataatatagggctaataatggtttatacaatttctgtgagaactaaagtagtgaatacatgtaatacacataaaattgtacctgaaacatgataaaatatattttttaatgttaactgccactaatactgccacctggctaaaaagggatagaatcagaatgtgaaacttgtttaacttcagcacatactctcatctatcctctgattctcgtatgtctctatttaacatgacaatgttcatattctcccaagattacaaatgagttaattcacttttaagttctcttcactgaagggttagaaaatattatttgaataggctctcatgtggaataaaacaagcaaaacaaaataggcgtatgcatttgcactctaatccgtggagatttttcagtactttactctgagttatttgcagggctttctcattctgggattgttttcttaatggttttggagaggaagttgccatcattatttatttatttatttttcttgagacagattttctctcttgttgcccaggttggagtacaatgacacaaaattggctcactgcaacctctgcctcctgggttcaagcaattctcctgcctcagcctcctgagtagctgggattacaggcatgtaccaccatgcctggccaatttttgtatttttagtagagacagggcttctccatgttgtccaggctggtctcgaactccaggcctcaggttatccacccacttcagcctcccaaagagctgggattacaggcacgagtcactccctccagcccaaagttgccattatttaaaaggaaaagacaaaaagagatattggtcagtaaaagttgtggttctactcagactatagaagcctacattatttttatattgggcttcttttattcattcaacaattatttgttcagtgtccactatatttcaggcacgattttagtgtgtctgctagtgtttcctgcggtctgtctaaagattactgtatttgttatctattctgcatggtgtattagtgtatttccccaaatcttagtgtattaaaacaaacatttattatctctcatgcttctgtggccaggcattcagataagacacagcagggatgatatgtctgcactctgaatgtctaagccctcagtgggaagacacaaagaggctggaatcatctgctggttcattcattcaaatgtttggcagttggtgctggctctctgctgatttctttactaggactatagtctggaacagctacacatggcttctccatgtggcctggacttctcacaacataaaggttgaattccaaaggcaagcctcctgggagacagccaaacagaattcatatccatcttatgacctagcttcagaaatcacatagcatcactcttgctttattttttcttgaacaattaacatttgtaaactgtaaaattctgcacaagtgttgcttgttattggtgtttgattggttgaatgtcatagcttttcagtattaatgaactctaattttctgagcttggatttcttaatctctaatttttctgagcttggattttgttctccataaataagtaaagaatgcagttgaaatgattaaaagaggaaaattatgaaatatttgttttgaaaaaatgcagtctattttgtaagtatttgtttgtttattatagatttaaaaccttttcctgtaacttgtactctaaagaaataatttccagtcatgtcaagtgaaggtcagcacacaagccatttggggagatgttagagtcagatagatgtgagttgaactgctgctcttttattagttatgtgattttgaacaagtttcctaacttctctgaacaacagggtactcatgtataaaataaatacatatgttcttagagagtagataataactagaattttattatcttattatttcttgttatttgaagtacagggtgcataaagaattatatacctcatgtaatcagcagttgttacactgcagatggtggcctggggagcatcagtgtagggatgtatacaatcggacttaaacagaaccatcgataactcacaaggcacatttttgcaaaatggaaaaatataacctcccctaggaggtcacagtaccatgccacagcacacagcttgggcaccagagtgtgaattgcatttctgttttcacttatccccaggtgggtttctttgggcacacaacagcttgcacaaccagacattgtgccccagtgcattcctatctctttataattttacactagttgtttgtatacaatttaccagagttaaatgcagtgatgctctctaaacaggctctcaaaaaattgggggtccctgatttgtagcatgatatctatggtgtgaatactcccacaagctaccaacatgttaacaactaggttgcaaaacaattgtctctcacttgtctataggagactgcttcaacacacccactggcaaagagtaaaatttgaacaagtgccagaaaacagccctgggaccactttattcccctgagacacaaatcacccttagaggagtccccataataaaatagaaagccttccagagatatggccagtgtcacagtaggtaatttgctttttttctttctaaactacgtctatttgaccgcaaaaaatgttagtatttctccccaaatgcttattgataccctttggaagacagaaacattttagaacatcacatatcagaaaagaaaaatgtgttgtaatattttttttaatgagatacactgctacaacatggttttggagaaggaaagacagacgtcacatgtcttatcttggacacagaagccaggctgtgccagccaagaacaaaataacctattggttacaactcgttggagctcaacatgtgctatcagctcatgcttctatatttttggtaacatctagcagattttatggtcatagcaaatgtcatttttaaattacagaaatgaagagtgaattataacaagagacctggctgatggattgtttttcatttcacttcagttttggttttgatagtctgtatcttatcacaaaggaggtaagagttagacaaaagcatttttcaataagggcaagtgtwtggttagaagttaatatgacctccctttgattctattatattcacttgaatttgacaaatataaaaaggccatggccccactcttcaagaagattatgatttaaaaattggacttaaacaatttactgtggcataagatcatagttgtaaaataatagtgctactactactggtagtagtagcagcagtaacagcaactaagagaaaacccatatttgtattcagaatctgctaccaattggctgtgttaatttggacaaatttatttatctgagcctgttgcctcatgtatagaatgggaatcctatctcacatgataaagagaatatattgtctataggagttggcttcaacacactcattggcaaaaagtgaaattcaagcaagtgccagaaaacagccctggggcctcttaattctccttacacacaaatcatccttagaggagtcacaataataaaacagaaaggcttccagagaaatgcgaagtgtcatagtatgtacagtttttaataatatcatcaaatcattgttgtgaggattaaattagatagcattaaaattatttaatgaaaattaatcttttgttgggtgcatctgtaaactgggtcacatactgcttgcagcaatgaaggaacacatacatgtttgtccctttcttccccatcctggcactgtttataataaggagagggctgtggatattcagagtcagaggagatcccacttgatacaagggatcagaaatgggattgtgagaaaggtgatgttgagagaaacaaataagtatgaaagaggaggttttcagagtcataccccacatggaaggtatgaattgaacaactgcatgctcattgtggcaggatgacataaataggagaatgaactacttttaccacctctctgagaaacacagctgaaaatccatagctcaccaatagtgaataacataaatgagttttacctagatataaagattaatactctgattaacctttggagaaataattgcttttaaggcataaatattgaggatgcttagaataacaatgaatttaaaaacttatgttaattccgtgtttccaggtatcagcagattccttcttttactctgacttaaagtatttagtgccatttctacaacatataaaggaaacagggaaatcacttacttttcagagagtttcttttgaaagtgttttcaaaagcaaatctggctggatatgctagctagctagattttttttcaattacctctggagaaaatggctttagaatacttctaatagagctaattcttactattttctgctcacatgacattaccaagtaagagtgatggcattcttccatgcaatacccatttattgtatagtttctgtcaatgacatcaagatagtagtttagagcatacacttagtctctgttaggataatctgccttctccaggaacaatgtcttaagaagagacacctgcacacttccctccaagaagcttcatgtcattctgcagaaccatctttttgtatcaggaggtaaaaatgctgttagattcacctaggcaatttgtgtgagagctaggctttagtggcctcaaaatgaggggactgcaatgcaatcctagtggacaaggattcaccagagccacattcttagagaaacccccccttcattgaatggtgtcagtcaactgttgcagaacaagcattgaatcaggagtcagaaaagaaaatttaaagctttggtactaccaaatacgaggtgaatgaactttagacaagtcatatgacaactctccatatctatctcccatttgtaaattaaggagattagactagacacactctaagttccttctagctttggcattactgccactctatgttgggcaatttttctggcttacttgaagtattttacatgttgtaacgtttattcttgtgttgcaagaatgaggtttagtgataattcattgtgtaactataatgataaatattttatttgtgaaaaaattaagtgataatctctcgaattagcaagatttgaggataaatatttatcagaagtatatatatctataaatatttatcagaaatatattttcagttgctggtatggtcatattctcacaacctgcccttgattaagtataccccaaatatgttgtcaacacctagtttttgaccctcaataaatagaagtagaccaagagtttgagatgggcttaagtatgaacattaggtgaacatctaaataagatccttgaagttaaatacattttgccaataattcagatttaattgtttttattgaactacaaattttaaattagtcttatttgttaaaaggattacacaaacaaaaattaccctgttttggctgggtttatagtcttataaagtctgtgccaaaatctgacatattaaacatttagcagaggcaaatattaaacttatcgagacacaactgtatgctgatatttctgaaracattttaatatttatctcaccaaagatttttaaaaccagttttatatcctaaagattcatgtgaacttgaaaagcattttgacttaatttttgagtgctggtttatgtatgagccaataggtagcatgctagacacaatacatattatatgtatatacacataaacatatttaaacatgtatacaggcacactgagatccaatcgcttttatgttgggattgtagccataagatagcaatacgaactaatcattttaggaaagatagcttattctaaatatttctgacgaaactgggaccttttcacatggctacacttgatttgctccaataggtaattcaaggaaatttggggaccggaatttgggtaatgtcattttcatgacagttgtgatttttaaaacctcttttatctttctttttttttccttaattttaaatcagtttctaatgctactattttagccagaactggctgaactgtataagaaaaacaaaatcttttaagtaactttgcaacagtgagttttatcttaacaccagtagcttggtaacagcagattcaaagcaggaggagaaaggaggaagatagagagttttacaagaaagtagggggtaaggatagaaagagtgagggagttgaggaagggaggacagaccagaacaaaaagaaaccaatttccaaaacaaagtcatcagcagatgaaggaattccttactgtgacaacctaattgagagctcagatttcaaattggctgttcaccccttccctttcctcctcatttaaaattgctgctacggaatcccctttcactccttttccccttttcctttcctcaaacaactcttgctctccaaataggagagtattccagagctaaaggctgtcagatttcagccataactgaccagaccagaacagaaagaacccaggagccaatggctattaaatttcagccaaataagtagaaagtaaaagagaaagggttgttggagaaggacagagggggctacaggagaaggaaaggaaaaggggaaaagtagagtaaggagatatcagagcagcaattacaaataaggaggaaagggaaggggtgaacagcattgctcaaggggtgcccttgtaatctctgagctgtcagagaactcactaggtagcagagacaccacagaaagtgctcagggggcttcttgtctactactatggagaattgtccattaagtcaggggtctgggaaccccagttccatctgggttgccagaatgttactagctgatgggttcttggccctcagtgaagagaaatagaccaagagtttgagatggtcttgagaaaggcagtttattggggattttagctcaagcaraaagggaaacacagtgtataagtcagcacagtgtataagaaaaatagggagggctccctgtcctgatttccctgtctgtcttagtgccaggaatgcccatctttgtcctgaaaatacatatattaatacattctacattgtttgtctaattgtctgttcttagaaactttgcccagtacttacagaataaaatacaaaatcaccaacatascacaaaatgttctttccaatttgccctccataaagttactcatctacctttttttatcacttctttgtacacactcgagccatctcaaacttcctttatcattcagtctgcaagcatttatttgtgcatatatttacctctgccagggagaatggtccttaccatttatgcaattgtatctcttacataggtacgttgcatacttacttttactggaatgatgttctttgatttcttgctttccaacttttactcagcctcaaatatatatttattgaagtcttccctgactgcaaactcctccccaagcacttatctcagtaaatgacaattgttagttgacatgccattcttccccattatactacgaacccctagacaacaggaacaatgacttatttatttctagatctttagtacctaacatggctgaaataggaaaaagttcttatgaacatctggtaaattaaatgagcagatgaaagcaacttaaatgaaatccattctatcctcacctcttctttgaaatccatcttggcttatccttaccaattctatcaccttcttttctagtatttccattttcctcttatctttsctgatttagattcaactatgtttaccaacacttgtgctttatacagtcatgtaccacataacaacatttcagtcaacaatgattgatcacatatatgacaattgtcctataagattatatcacacttttactataccttgtctatgtttagatatgtttagacacacaaatacttaccattgtgttataattgcctacagtattcagtacagtaacatgctgtacaggtttacagcctagaaacaataggctatattacatagtctcaatgtgtattgggctataccatctaggtttatgtaattacattccgatgttcgtacaacaccgaaatcacctaacacacatttcttagaatgtatctctgttgttcagcaacccatgactctatttcatttgatttttatgaggctgtatttcctatattttttgtctttccatagagttctacccatgtgactatttaataargctgcaaatatttcaatattaatgttatttgttgtgtgttcatgcctctttatattcatattatctattttgtctataattagataggaagataagttagaaaatcattttgctacagcmatctagcagaagtactggataaatatttaatgatagtaatgttgatttactacaatatacagwatgagaacaaagaagttgccaccawtatgtgatgcaaatgtctactgcaaggatttgttgctactgaaatagctctcctaccatgtcttactttttgctgaggctttaaaggtttaaatgatttcctgaattttaactttaattccaaggccatacaaataagactctgggctttcctgtgccatcagcctaatgttttatggataggtatagattgtttctgatctttgatttggtccctaggtctaaaggaattttctgtggcatttcatatagtgacttatagtcaactttctctattccttcagtgtgttcttcctcaaactcattcctcttcctaatccttgccagattaatcttcctaaacctattcatcatttaactataccagaataaaaccttccaattttaggtccattgaagatagactgatattagaaatagttataccatgatatgataaatattattagagattagtcattatttaatgagtccttgactgttgtctagtaatatgctaagtactgggatagactggtttggtccctgtctgagtgtttgggaagattcacaaaggaaatgtcacttcacttggtgcttggaggtgaactaggaatttactacctgattctaatttcctactaattccttacattagtcaatgagtctccctgctctagagcaaaatggaatagttatgaaaggctaaatagcaaggattaaaacatttaaagcaaaatggaataacaaaggagaaactggaacttggtttgtatattaaactctaaaattttgtgtattttacaaatattctagtacctacttggtaaatttgattttttttacctaagtaagtttgagaaacatggtgctttaaagaaagagctaagatctaaagcatgtcttggttaaatcccatgataaggacccagttatggacaaaattgaaagtgttaaaaggcactcatctcaaacactaacagcagttctggctgcaggggagtaagggagttaaaggcaaagatataagaatgtggtatttggagtcctcaactggtgtgttaaatcattgcagcatgggtatacatgtgggaggtttggtgtgtggagggaacatgcacagggaggattrctgttgtttctcacttggctgagtttgaatggaaggactagaacagagagtgggaaaatttgcattcctttcttcctctgggaaattcagaactagccaacaagatccaattaacacacatggaagtcaagggaccattttatggtaatccaacatacttaatcacatgtgcactaaacccaaagttatccactcaacccaataaggcatacccaatctcctccttatattaattgatttctgtgttataaaatgtagtatgaaagatgaaaagagtaaaataacatttatggagaatctgctcaccatcaggtattgtgcactttgttttttaggttattcatgtttaattccattataaaactgcaaagtaggtattgtttttaatttgtatttttccagcaatttattatggtaattttcaaactgaatggaatgttgaaagaataatacaataaatgttcatatttcctggattcaataattgttagcagtatgccaaatatgtgttatctatctacctattgaattatcagtcttttgatgtatctttccctaagtagatagccagattatcttcacagaacaatttgaaagtaagttgcagacatagtaattttaatactcatcttctataaaactataatggtgttaccacacaagagatgattaacagttactttctaacattatttaatagctagtccctattcaaattcccctactattcacccaaattatttatcccaatttttttcataaagcaaaattcaattatggttcatgcattcatttggttcttatttgtttggtgtgttttaatgtaaaagggtctccccaactttctcctatgccactggccttttctcccaacttttattttgaataattaaaaacgtatagaaaagtttaaaaaaaagtaaacaaatccctttacacgcttcaccttattcaccaattattagcgttttgccacgtttactctctctagcttgcttcttctaattctgtcatttcttctacatggcattttttctataaataagttttctttcattatcttaaaatgttatttctatgacttactgcttttctcttaactagcaacttttagaataagaagttggtgtaaaaatcaattctaataatgacaaatgattctcaatttttaaaaaagcgttatcattctttttgatactcaaattgttatcagattttcctaggggaatcccttcaaattgactttcttgttctggaacttttgctgcccaagatacagagtcagccatttcacaagatgtcctagctccttttagtagaaaatgataaatagacaccaagatctttgtgctagatacggtcgttgctattggggtatcactgattcctaggccttttagtgagcaaagataggaaatttatatatattttaaaagtcataagtagatattgatatttctaattcaaatctaatattgcataatgttcccttaaaatttcttgcttttatatttgtgactcctttctgttacactaaaatttttgttttcttagtatttttacttattcactttatcctaacaaatactgtcacaaataacattgtggatacgctgttttgtatttacagaggtatggctatagagtagaatcctgtaaacgggatttytgaattataggaaagagtcatatgtacttttgttagatattgctaaaagtactctcataggtattctaatacttagtacccccactagaaatatgtgagaattcctgctgcttcttgccaacagagcgtgttatcaaattagaatttttaccaacctgtagcatgaaagagtatctcagtggaattttgtttctcttatcagtgatgccgaacatcttttcatatgtttgggagccatttgtctttctgtttttctatatgtagtcgtttgtgtcttctgctcattgttctcttgggcttttagcggttttcttgcagacttctggaggctctttctatattaaagtgatcagatctttgtgtttgtgatataagctgcaaatacattttagtttgttattcatctttaggggaaaaatgtccttaatattgagcacatatgtttgcatcatagttacaaaagctttcttttctcttaggttattagaaaattattcataatcatgttttcctcttttcttctaatacttgtacattttcctttatttaacatccaattctatgatgcatttggagattattttagggtatggtgtgaggtactgatctagttttgtcctttttgaaatagctatacagttgtctcaatattatttatttaaaaattcctttttttataactgatttgagatgtcarctttatcatacactaaattccatatatatctgggtctttttctcaaccttatttctgtattcaatctgagtagtatggcaacatcaaattattttaattatagataataatagcctccccttaaaaaagtgaagagtcaaaagctttatgagataaatggtttgctaaaactcaatttattaataaaatatcagagctaggatttgatctatggccaccctgtcttggtaggatttaagtatacatttaggcaaaatatttatctcagtcaaataagtctatctgctatttatgtcagagaggtactctgaataagtggtggtttggggtagcttaaactataaatattaagaacacagagtagttttgtaccataaaaatgattattttgttaaaagtgttatttcctaatacatgaattttcctatgtactataattccaaaaattcttgaataaccctttayagaagcgagatttcacatgcataaatattattagagtataaatggcaaactttaaactgatttaagccataatgaagcttgaggatggggaaagtctctatcattgtctctatggcccactctcattgtctctcatggtgcacgtaacatgagaatctctatgatgaatgtgcattcttttacaaatatgaagaagatccactagtaagtagatatgaggcaaataaatgccacttgcctaatgttaagcagtttaaaataaaaacaaaaacccactggcagaagccatctggtcctggcaactttcccggttaaacacttttaattgcttctgtgatcttggtgggttggcatgccatggtttccagggatttargagaattgacctttatgaagtaatcacagttcgttgcacaaaagaactctgagttaccaaagcaggcagcatgtcctgctgtggagccatgataatggaagtgaatcaagtgtgtgacggtttattatttgaattaaatttactgtgatagtctacatagtacgacttaatgttctacatactatgactttccaagggccaacagtgttcaacctggaatattctgtcagttttggcaatgaatcataaatatgtcatgacctataacggatttttttgtttatatttagggtcattcatgtgattccgaggtccctttcctatgcattgtcttgagatttttgcttaagagttgggagaaagtattcccaacataacattaattactayatatttgtatgtagatatgtgtatatctatatacatgtgtacatttttctcttattcrtatctatttatgttgaatttcattcagaagaagcttattcaagtccactataagctttttatcttaatttaatattaataattatagttaacatttattgagcaattattatgtgctaagaactatgatcagtacatttcacctcttgatgcaggcaaactcataatttttgctctgaaaagataaaaaagctaaactctacactactgaaaaaaattacctaaagtcaaaacagatagttaaatcatagaaccatttaagccaggtcttaaatgtgatgccaaagtccaaactctgaagagattgagatatagggatattaattctctgtgctctatcacataactagattcttacaaagctagggttagtactcatgtttactgtctggcaaaccacsacactgagaagcttaagtctgaagctgaatgtacccagcatcatttgttgcctcctctttatccctgtagttgtttgttcatacctctgttgtagcagctgccattatacatattattctctgttgatatgcttgtgtacctgatgccaatatgcaaaacttgagactaggatcttgtaatattcatatatgctcccagagcacagagcacagcccttaatatatagtagcttctcagtaatgtctgtcgaatcggtsaatttagttcccaatacaaattatctctgtatgaccaactcattgcaagggtaaccatttttgaatattttagagtaaaattagattgaaattttgcatatttgatgtatgttgctgtatacataattgctaattcattcactaaaggtgaacttcagtttatgcccgaagtggagggcaagaggacatggattacattcccccttctccctttctctcttagtctactaaagaaaagagtataataggtcgatcaagtctggtattgtatgcctcttattttcagggacacagataatattgaaaacccacgggtgtgttcaagattagggattttcttccaggtacaacatgcatcattcacacattccttgtttcatccagcattcattgtacatcaaacacgatagaccctgaggatacagagatgagttgggcatagtcccttccctcagtgaatgcatagttaatttgggtatcataatcaggtaattaaagtacaatgcacccagatagtgggggcagtttcatctacaaagaaataatagtccatcaatactacctcatcctccccttctcttgtctcaagcggtgttgagctcaggcactgtctgccaattgtggtttccagacaacaagagtattaggagtgcagtccttagcacagagggctcagatatgaccaacctacaagaggccttttcttgagatagcatcactttctctcttctcctttctcccactcttcaaacttctctgatattcctgaggaggatgggccctactctgaccctctcatttctgacttatttttattcagagcagctggcttctcagaggatacatcccatgaggaatactgtagtaaacaagcctctgtctgaggaaaagacactgcctggtaagagaaaagaattaagcactggaaagtaggaaagcaaattctgtgaactggctctactccttggcgtgacattgagcaaggggctgaacctctctcagatccagattgtttttttccctaagtcaaaggtgctggctcagagatttcttttctgctctaatattgcatctctttgaagactgccttgtaacaaatagaattggattttatataataaatacctactcccatttatgcacttgacacttccgaaagctagctcttacgttgttaaaaatttggtaaaactcaaaaatcattcttcattgcaaaaagatcagtgtgtgatatctgtagtagcctattaaactctttgtaggttctgaaacctttccttaaaagactgggaccagttgttacgttggccactaatagttttgctcagctgaagtctaactgaagttagacatgttattgaatttttgtattttcaaccctcgtgagtgatgatgtagtcatttcctgttcaccattaaaaaacagagagagtaataagccactcctattgtcttttcatttctttggaactaaactggcatccctcttaatacttatattttactctgagtgtgaaaatgtgataaattgtgactttacagccctgtgaaacatgaagggtttgtttcttaacataggttcatttcttagtttttggacaagtattttagtagtagaggctgrgcaatgtttcttctaccaagaaaactagatttatgtacatgcttaaaagcacagtggtcactgtgtttatcaattaatttcagttattttatatgtttatttgcattattaggtagttgttggaaaaaaggtttttaaaaaaatgttagtatatatagtcatcaaatagaatgtctaaggataaaagagatataggacctcttgcatgaacttccaggaagattgtaaattgtttaatttgtggttaaagtccctgactgcttgggaaccattttgataaatgggaccttttcctctttgatgggtaagaaggcttagtaagaaactgaaattattaattataaattatagaattataatagttatatacttaataaggactcgtgggatcatttagttcagtcttttcatttcacagatgacaaaagtgagtcatagagaagtcaagaatctacttaacgttgatgacatttcgccaaggatcttgatctcctgtctttctgatgtcttttcctatcatctgaactgatttttttttaggactacagagactcattcacccattcatttatccaggcatttactgaatggctactatgtggcaagtgttgtgccaggtgttagaaacacaatacataaaatgtagttgctgccctcccagaactaattgctctatctaccacaggaaaaaaactataaactggcacctttctccattctgaaaaaaaaaattcagtatacattgattcaatacagttgtgctgaagccctgccagttaacttttaattttgtgttcttcactctttatattacttctaaattctcacccaaagcctatcttgaacatttatcaagtcttcaatgaagtcctgaaaatattgatccaattattttatatcaatttttaaaaacatttttgtattactgcctatacatgattgattgacaggttaattaacttttccctatttctggtcatttatttaaaattatcggaaagcataatttaaaataaatttttaaaaagaacatatttttcacactacactcttacaactaatctaatcataagacatgcatatagaaaagacatagcagagaggcaaaaataatacctatagaaacagactaacctggatttgtgttctgtgttaattgttccatgtgtggcattcattggccatcttatcttaaattctaagcctccattttcttatgtataaaatagtgataacatcttccttgaaaagtttgtacaatgctaaaatgagatagtggcacatggtataggcttggaagaaggtgagcttgacaagtaatagcaataactcctacttaacctttagggattaaaattcatattgttataattttcttatttttttcatagtcttcctaatgcagtttcactaaattaagagagtttgtgaactaccagaaatatagctgaagaaattttcaggggccatttcatgtattttcctgcccttaggtcgaactgattaaagtatgttacacatatgcaaaagctgcttcttaaaaaatgtttcaatgagtctcttatagggtagttcagtgcagtaatttattcacttagaatgtggatttaggcaaactgctttacttgatcagcttcacattttttatttatatgggctaagaaagagctccacaagggcaagaacctcacctgtcttattcctcatcagcactagagaaatggttagcatataatatatacttcataaaatttattgaataagtgaattaggctactctgagacttaaataaaattaccacacacatgcatgcacatgcactcatatttaataattgactgacccaaattcatttattaatgtttgaagtaatagtgttaaaaaggttgtaattcatggatgtattaatcaactgattataatgataatttttctaatagaaaagctaagaacagggcaccaccaagaaagtgaatttgaacatgagagagatgtgtgatacctgagctaactctgtgtatagtacaaattttagatcttcattcttggaatgctgtatctagaacatccttcaaatatgattggttctttgttcatttgtttgcttgatgaagcaatattaacttcacttgatgaagtaatattacccagatgtcaaaaatgataagaacaaaaataattctatggcctaccctcgttcataaagatgaatagatcctaaataaaatgcatcctacacaacgcaatagtcaattgatgaatcatctattagaataaatagagtttactccctggaaggcaaagatgttttaattagaaatctattaccataaaacatagaatctgaagatcaaaaaaataaaaaagtatcattctaaaacatattaatcctatttgataaaatttaaaactcattcctgacaaaatttctcagaaaacctaaaatagaaggacactatttgacatagtgtagaaaagctactccaagctaacaatctctgtcatacttattgttgaaagactaaaagaatctccattgaagttggaaaaagtaaggacagttgtcatacctattatgctttaacattatttgaaatttctgacaacttaattataacatgaaatagaataaggtacatctcagggagaaggttaaattgctgtatttttgtcaaaaactcaagatatgggccaaatagaagtattaaaagatgtatacttctaactacttcaaaaaatggaaaatataattttaaattagatttataacactaacagaaaacacaacctacctagaaataactctaatatagctatgcaggatatagatgaataaaactacaaaatcttaccaactcttgtcaaatgtcgttcaacttaatggcaaaattatggggcagcccatattccagaatataaaatataaaagttgaaaaaaagttaaattttctagtattaattttttcagaaacaacctattatgtaccccataagtacatacacctaaaaatttctaatacttaatacaatttattgatggccaaataataaattattttaactaatgaaaggattataatgtttacttgggataataaatagagaagtgatattatttgtcaaaaggtataacagtaagtgggctatttgtcctattatatattaattaacattacaaagatacaacaattaaaatggtatactgctggtgcaagaactggctgacagaccaatagaatggctacgtgtggaatagagcttagtatgtatggtaatgtcatatatgatgaaggaagaaatgcgaatcaaagaggaaactgatagattattcaaaacatagtgttcataaaattgacaatgtgctgaaaaattgttagatccatgtcatattagcaaaaaaaaagagtagttaagagtgcaggcttagggactgctggagttcaaactctgactccatcatttactaggtgtataaccttggatatgtaattctatctctctgaactttagtttcttcacatgaaaaatggggattgttattacctcataaggtgtttatgaggactaagtaggagataattcatgtaaagaatttcgtgtactgcttgacaaagtattcactcaataaatattaccagtaatttttataattaaataccaacttaattacaaagatattgataggctaatgtaaaaataaaatcatgaaaacttcatacttaactgatcttggctttgaaggacattctaatcgtaaatgcaacagaagaattcacaaagaatgaatagatttgactacataagaacttcaaaatactatgtttaaaatagaaaaagtagaaaagccacaaataaaaaaagttattatatttaaactctaaagagctcttaacagatcaattcaaaaatcaccaacatcctaaacaattcacaaaaattacaacaaattcaaataaattaataacattctaacagcatttaagataatataaataaaataccaatgggtactgattttaagctatcaatttggcaaagattaggaaaagaatatgacaatattccaggtgacaagactggaggacgatgatcacttggatacttctgaacaggatttacttcattttaatgttttggaaggcaatttggcaacacttagcagaagtctcaaaaatatttttaccattttagtcattaattcttattccaggaataataatcaggaaaccaaatcagcattttgtatacttattttatcacagtattgtttgtaatagttgacacattcatgagatggaatattattcagccacaggaaatcatagctctgaagcacattagatggtgtacaatttcttacactaatagattaggaaaattataattagtagctatgccagtctctacatttatatctacatctgcgtctatatctgtacctgtatacagaaagcaatataccaatttactatcatttacgtagataacaggcttgcagatgaattttatttttatgttgtatgtgttcagattttctataataatcagcaacagttaaaaaattagaaaaaataagacaaatattaaaatatagatgtattctatgtattgcttcatttttagaagataatagtttacatgcaatgtaaaaattggtatttatgagatttgttgtatttaatcaattttgcacgaatttaattataaatataactttggaaaattaacaataggctttctctttagttcgtttgaaaaaacgtgagagagaagaataaaactgaggttatgaaattgctctcagaaacagctggaaacatcattcagggtcgcactctgtttaatgttcaatgccttttcacagggaaataagagaaatatgagtcttggcatatgttattttctgcatgaaagcttactaaaatccctggtgtatttcaattgcaggagtaacaggcaatagcattttagtgtctctgccatacagtttggcatttgattatatttagtttagcactttgtaatatactgtctttgtaatttctccctctatgaattctcaaaacattttgtatttttactgaattttagcacattttattccatttatcgagttgttattccactaaacaagttttattttgtagtatatccaatctcttaccagactgtcaactccctgaagtcaggaactatgtcttattcatttctacacctcctgcatctagcccagaattccttgcatatggagatagtactttttatatgaatgaataaatgataactatttgatatattgtctttgaattatttcaggttttatgttttctgttctcaacaagattagaaactttaggaggtcacatatggtttttgtacctaatacctgttaataaactcagaattattgcccacttagttaaattgcttaacctgttgttttgcaaagtaagtttggataaaattgtctgaatatggcttattagcataactcttggctaaccttaaactaaaaacaataatttattttaaaatgttgctgtaccttttttttaaatactaacttataacaagtggttgttacttaaaaccacatcacttccttttaccacttccaaatatttgatgagcatctacaatacatcaagcatccttctatctaatgagcaaaaaaggctaaaatttctcccttcacagaacttgcattctagtgaggatgggaagagaagaaacaaaataaataagtgaaatacgctgttagaagctgataagtgcaatgtttaaaaataagagcacatccaaaggaacagattcattgaaaatgtgtcacttyagtgaagacttgaaggagtgaccatatgaatatttgggaaagagaatttcaggaataggttagagcaaagaatgagacctgagaagataatgtatgtggtgtttttaaagcccaaggaccaaagcagtgaccagttaggagatctgtagcaaaaggataaagttagttcatgacttcacaaagttgtgatgaggtatgaacttcctgtaaagcacttagcacaatgccttgcacatatcaaataattaattaatgttatttatcatcattatgggaattatatgagataggctcctagaacatttgtagaaaaagaaacacaagtctatttagggtgaaaactagggcattcttccaccatatgtctgggccaaacgtatctgattctaaggcattacttccttgcatagctacttgtcatgattcatatcatgggtaactacttatccatgcttctaaatacatttattaaaaatttggtccatgcagcttcagtgaatgagctgagggaatgtaagttgccttatcaaaatgcctgaatatagtcaccataagattgtcaacaggcttttcatgcaaagcgacatgaaggccctcctgctcagaatccagtgttccatacttgcttgatgagggttatgctcattttcatggatgttaggtcttacacacaaccttaatgtgagccaaattcctttaatggatgtkctggaaagatctcagtgctgtgaagtcaagaatgcaatttgagctgtgccgacaggaaacaaattgatctttttggcctgtattcctgaatctgaagcagcccttccccatcagaaaagactttcttagatgatacagttgaattcccaaatgttcctggatgtggagtcctaatttggatttgctgttaagcccttgaatatattttcaaatagcggctatgcctttttaaatgcccaatgaaaagtagaataaaagtctagtatgtgttgtatgtatgatccttagtgatactttctttctatttttttttaaccacttggcttctttttcacttccacatttttcctttgatttctaactttttttaaaaatgcatttgggcaaagagagggagcataacacagtcccagggtctcttaraatagtttgcttgccaaaggttgctgaggttaatcatttaggagatagacttggtaaattttgtttcctaagcaagcagcagaaaatagagtagaaaatcaattttggaaattaaaattaggtacactgcttaagtctttttctacaccaaaaccaaactgaataaaatggaaaagaaaaatagaattgggatttctgaaattctttatgaatctacttgcaatgcaggccacacagaaacatatacccaaaatacattgttaacacttgcattattactaaacgttaaatggtgtcagaaatggacaggtgtgaaatttcattaggaaaattgctgtaggtgaggaatagaagaacagaagttaggctgaaatagaataaaaaaggaaatagaaatgtttgacaaattattttagtttccccctgttttctttattattttatatttctttattatgaagtcattttttattccacctttttaagaaagcaaaacgttttcaagttttagatgctaagtgtccttattgaagaataattggcataaaattgcacatatttcaagtgcaatctgatagatcktgacatatatctacacctgtaaaatcatcaccacaaacaagagaatgaatacatccatcatcccctaaagtycccttttgctcttgtgtaaagccttccttctctcatcctatcattgatcaaccacttataagctttctgtcactataaatttgtttgcatcttccagtactttatataaatggaatcatgcaaaatgtgcttttttatttggcttattttctcagctggattatttggagatttgtccatgcttttgctcatgtaaataatatggttctttttattgctgagcagtatttcattttataaatacaatacaatatatttattccctcttaaggaacattggttttttattccagttttgggatattgaaaatacagctattataaaatttgggtataattttgaatgaacatatgcttttatttctcttgcttaaatgctttggagtggacttgctggctcatattttaggcatatgtttagctttttcagaaactcccaaacatttctgaagtggttgcagtatttaacattcccaaagcgattgttctattctacatttacatttttgaaagtatcagaggctagacaatttcctgagttccatgggtagtaagaatatatctatttcttctcagaggacagtcattccttccatgagaatagctcctaaatttttgccttcttcttcctccttcctttgtaccttatcatcttcctctsgagattcagcttttcaattcatactgctaattggctaattatcttctttagtcatctttttatgagactgtgcagatgggacactggataaaagtaccctaactcagtcctcctgaattattttttccctgaggcaacctcaggtagaactatctccttatatgatctagcctgtcatgaataaagcctttatttgactttcttcaactcctctgtggcagaatagaattttgcaaagactgcaccaaataccaaagaaaacaacaaaggaaatgagtacagaaaataagaagaacggcttctgatcctcaacatagctaacaggttcacagaggctacagaccctcctccaaggaaaacagagaccatatgataggcattctgcccctacttgtggttaagagcagagattctgagttagattttggcttgcatgcggaatgtgccattgttggttgagtgtcaacccccaacaaggtacttcatttcttttagtttacttacgtgtaaaatgggaacaaaaataggagttaccacactgaattctttgaaaattaaataagataagtagttaagtacttgattcatattttaaaacttgataaatgttagatttggtagtcatcttaaccacacgaagcaaaatatctacaatataaacctgaaatacttgttggaaccttaactccaacaaacttttgggccttacctggtcttayaattattgatcctatcatcttttatctggktcccatttctcttctagccttactaccttttctaccaagcttaaactctaggaaaattctttataaccagttccattacatagaacctcaactttcttatccctctttcagtatattgatttcataggatttacagttcagtaagaaaatcatgtattaaatagataattgtaaacaatgaaatgctcaaggacttgatctttaagctttttctctacttcagccagtgatcaaggctttacataccatttctattttgatatcttcctcaaactctggacttatatatccagtggcttacttgatgtcttcagtcagatgtctaaaagatatctccaagttaacatgtccagaacctaacttctttttttaaatttatttttttttgaaaatttatacatagtagatatacatattttkggggtacgtgtgataatctgatacgttcatataatcaaatcagggtgattggaatacctataatcttaaatatttatcttttctgtattttttaaatatatttttctgagtatacgatccatttgtaattcttttttaaacttttatttatttatttggagatggggtcttgctacattgtagaggctgaactcaaactcctgagctcatgccccaacctgagtagctggaattacaggtgcacaccaccataccaggttgtcagaacctaacttcttatgtttcttacaaaacctgctccatccacagctttcctttgagctggtgatgagatgacctttctggtttatcaggtcaaaatgtttggagtcatctgtgccactcctctttttctcacaggctacattcagtgtagcatacaatctgttggatctaccttcaaactatgtccagaacccaaccactttttaaaaattttcatattaattagtttttccaagttactattccttttgaatttgataactgtaataattcttaactgttctccctgctccaagccttgatcccctagagtcaaaatttttaagacagcaggagtaatcctattaaaacattagtcatatcatggtattgctcttagattgcttcctgtctcattcrtagcaaaagccagattgcccacagtagcttatgaggcttacaagatctgctttccacacttcttccttcacctacctgtctagctctccaatcttattttgtaccattttcctcctcattctgttttagccatgctgttctccttactgttgtcaaatggtagccctagtcttcatcgtcgtcctcctcctcctcttcctcttccttttctcctcctcctcttcctcatctcctcctcctccttcttccttctttttttttttgttaacctttcagtttatttaatacaggaacaattacaattttacttgaagatgaaaatgaccattcaccatatttcacatgaatatacctctattcattcatctagattcatctactttttcaaaaaaccatatctagaatgtgatagatctgtgagttcaaacagtcccttcttaaggccttcacatactctttccccagatatcttcctggcttgctgtcacttccttaatcttactgagctttaccttaatcaacttatcagaaaaatttaaccattcccaacaccttttattccatttatctgctttatttttctctttagcttgtatcactattgaagagactacatttttctatttatcttttgtactatctcttttctrcaatacaatgtaagctccatgaggtagggattgttgtctgttttgttcattgttacgaccccattgcttataaacaggytggtgcatcgtaacattcaaattaggatttgttgaataaataaataagtggaggagggattactttatcacattgcttattagacatatatactcccgagttttccaggggcattaaaatctgaatatatctaaaacttagcatatcatgaackctttcattttttacatgaatgtggatgtccccctaggcacagcataagctcccaagggcaaacaatgaattagaaaaaataaaataattgacaacacttctccatttcaaaaacaagaaaaaataattatctgctttagaagagtttacaaagaaaatatagaagccttaaatggaaattgtggaccatgagaaatttaatgagataattaaatttctaagacattaatttaacgaaagtttagatgcagcctataatattagaaggtaaaaggattgaagagacaagggaagaaatacaaacatttataatgaaagaagaggccatgcaaatgaaaatttttccttcgtcttacagataacttgaagtcccctgggctcaactctttagctgcttgacttttttttctcagcctataaagcagcagtcaaattttacagatttttaaaaaataatttcaaattttatttagattaaagggtacatgtgcaggtttgttacatgggtatattgcgtgatgctgaggtttggattacagatcagttatacacattctgttccctatgttatttctyctttcaagcatgaattaaataactcttttytttttttggaacacttattatgcaccaggcatgttgttaggcacggaggctacaatgatgaataaacaggcatggcctctgctttcatggaatgccctacaaggaaaccatgaaaaatagatgtattaaatagattattgtcaacatgataaacattgtgaaaaggagtgtattttactaagagaatgggccagggatttgaactcagtctaggacattaagaaataatgtttcttttattggtctttgcctttatttctaccatcatccccctaattaaggcccccattatttctaccaccttcatcattctccctgatctctaaatctgaccatgtttgtcatgattaaacatttattgacattgtctaattatgggtacagtgttttctgccttatttttctcctcaaacacatctcatgttttccaaccttcttgcttttgctcctgctgtttcttctggraaaaaaaaaaaaaaagtacttcttgttctgatctgttttctaagtactaamtcaaattttctttctcacagtaagcctgtcttcaccaatccaactcatgggctaatgttctctgaactcatagaacttgctgcttttatttattttttttgtcataagctaccacatgacatttcttgtactgttacgccatggcttaaagataaggatgttgagagtcagacagggtttgaaaatctggaagcaagtgagaagcaaaccaggattcaaagcttaattcctctaggcaaatgaccttgaataagttaatcaattcctctgaaatttagtttcctaaatttgtgaaaggaatttgatattatctgactcaggtattttttgtgaggattaaattagttgagagtatttcttgaagtatgatatacataagatggtagatggaaaacatctttaaaaacatacttatactttaattttaatgtaattacttaaaaattgtaacttcagtatcaaccatcatcttttcaattagactttaaaattacttgtttttattttacttcttaatgtgattagtattttatttttattgtgttatttatatggttatttatttatgaaaacaaacccttgtgtttattcggatggcaataagttcccttttaaaataaatttatttaaataaaaagtgagtcaaattaaattttaaaataacataagtaaacaacaataaagatagtatgtaaacattttaaaaatggctgatgttagaccaatactaaggaaatgcatgttaartactttagtggacaaaatactttgtgcatcttaaagtcaaggcacttttaacttcatataaagatgcttaacataaaaatagctgacatatagaatacaactaacaattcagtctccccttttctatctagttagccatgaagtatataacaagatgatgctattacaccttttttaaaactttgtatattttttaagctggagagaggttgcagttaatatcaggaatattttcagcaacactatctgtaattgatattggcattgaagatttcagcagctgctctttctgttttatgtaggtggcaggatggaaaatgaaatgatttgtatgttttcattagtggatctcatttttaaggaaataaaaagggattttatttattactgtataaattggttttatttattgtattttgcaaaagatcacttgttactgtgaaagagtaggaattacaaagtaaaaaaaatgtgacagcttataggtccatgtatcaataagtgtcagtgatttacctttagaaatggtgttttctgaagcactttgaacacttgttacaatgacttgtctcttatggtatgaagatgagtataaggtaaaaatgcaaatagagggtaataacaaatgctagataggtctctgtatagtgccttcctttcttctcataggagtgtgaagctgttgtattcaagtgatatgcttcattcatttgttcattcattaagcaaacaactattaaattattcaaaagatagttattattacctaccacgtgtggaggactatgtaggtctccgaggatacgaaaataaataaggtatgttacttttcttgagtgtttcataggcgttcggagggaaacataagctcaaagtaattacaagtaaatataataagaactaaatctgagttatgtacaaagtacaataagggacatagaagagagttactggctctgtctggtggttatctggaaaaattttcatagacatttatttagccacatctcagaaaatttgtcaagatttgtcacatataaaatgacaaggagcagaaagtaaggtggatagggctgcagacagcagaaacagcatgttcaaaggtacaaatttatagagcacrttggggaaacagaaaataattttgtgaagatccaaagggatggtatggcaaaaatacaacttcatcaaaaatggccaccggatttaagagattattgtattactcattaattattgctcataaatgtcatggactaatacattatttgagctcataaggaattgattatgtagttcaatacccagagatgtgacaactgatggaaatgaaattaaaactaagactattgcttccaaaactagcacttcacctccatgaattatgaaaataattctgttgttgagatagctagaataccaggctaactgaattttacttaaaagaaagttcccattccaaagcagtcaggttaggtgagtggtgtttaaatgtctgtgttttttgcatgctttggaagagcatgtgaatttaaagatattgaattgcattctcagttactaaattattaaattaggcatctttagcactgtgtagctgtttcaaaaaaatggccttatttatgcattgttgtttgtgctcacaagtcaaagttctaatgttccattagatattccttcttgactgctggcttgatatttttctacattgctcgtgaggagctatgtcttcccagctctacgttccttttgatagttactgccattatcagtctatttttctgctgtaagaaaatttaattttgaacacatgaacacatgggtggtaaatcacagcatattaattcagatctactatataagtttaggacccatttgagtttttgttcttacaagaggtcctgcaagccttcttttgaggctctggaaagattctctaaataaataaataaataaataaaacttagaaaagaaaaagaaagaaaaaactactcataaggctcaagaagatatttatttgtctcagaaaagagacacatgggaacctggaagactttaaatttatgaaatatttttacaagtttgcaactgatttgttttctttgctaatggcataaaaggggagaaaacactgaagcagaaagaaggtagactttcctcacaggatgattaaacagaattataaagagcttttagaaatcattcttttcggcttcttttcataatattgagcatgtactgtctgtctagactattgtgattttgtcttccttaaagattggaatatgaataaaaataaaagcagtatttttattgcactcaggctatgtgccagaactactccaaatagtgtatatgtattatctcatttgctcctattatcaatactgttacatagtttccgttattacccccattttataaagttagcataacttttccaaggtcacaataatgatggtggtggtctgtcttacagcgtagtttagctaattaactattataatatggtgacttttgactaacattttaattagttgatttccccaaatctcttgcaggaaacacttaacaataaatcttatacatgttgttaccacacatacttattaaactctaaagcctcatttgcaggctagttaaatgatctagtttgattttgggttaatttagagggatgccacgtggacttgtttgtgtttgtgtataatgatggccacagcagtgagatcctgaactgactatggtatcccaggggtgtatgggactcaataaaggcatttagggtgagagtgtagggttttgatggacattcagggcaggacacttgacgttaggatcaccaaaggaagggaaatgaaactgagactgttgcataaaactgaaaacataaaaggattctcatttgtgaaaggactttttaaaaactttattcaccagcccagggtagcaacaaggatgcatgtttctattaggagtggraaaagaaaaaaaaagagtaaatttwaacccmaccctattttgtggggagagtatagctccaagtcaaaaaaaaaaaaaattgatatgaaactgctctkgggctagtgaaatctctggacaactagaagagggatgtgcaaaattattctgtagcaacagttgcacaactgarggtcgcagggactcccacagaaactataatctttctaaagataatctcagaataaaaatgtacaatacgatgcagaaaatactcaccatgagtgaaaccagtgagattagacgttcaggaaaattagggaataaaaatatcagataaagactacaaactaagtatgtgttaaattaaaatcatgataaaggaagaaaaatcataataaaaacagaacatgatagatttaaaaatatatatagaatgtctaaaaataaaaawggtataaacaattgattaaaaatggatactctgtaggtaggtaaaaaacaataaattgaaatttaaggtaaaaatagaaattagaaaatagtaattagatctgaggatataccctgaaagcagcacagaggaggaaggagaaaaaaatatgagctctatgaagcaatagtacgggtagaataaaatggtccagaaaaaacataacagaatttaagagaataatgagagtgagggaaaataaatatttgaagagttaatgactgagacgtattttttttttttttttttttttttgaggcgaagtctcactctgtcgcccagcctggagtgcagtgacaccatctcggctcactgcaagctccgcctcccgggttcacgccattctcctgcctcagcctcccgagcagctgggactacaggcgcccgctaccacacccggctaattttttgtatttttagtagagacggggtttcaccatgttagccaggatggtctcgatctcctgagctagtgatccacccgcctcggcctcccaaagtgctgggattacaggcgtgagccaccgcgcccggccatgactgagacttattttataaataatcagattaaagaaacagaatgagttccatgtacattttttaaaaaagaaaatattatagtaaaaccgaagttcaagaaaggcaaaaaaaagtatttatgcaaaccatattaagaaagacatatttcttgtaacaggcagcaaataggcagcaggttaatatcttcaaagctctgagggaaaatcattgtcgatttacaaatctgtttctatactctcattcaaagtctagtctactatcattcagttcagggaaaatataaatgattgggtatgtttaaacatcattgatttttgcagaaagactattaaaatgtatttatctgtaagaagaaaatttaatccagaaagaggggttaggattctaaaaataaagaagttaactgatagttattgtgagtaaactataacaaaaaatgataatggtgataataataatgactgatttggtggggaatgtaactactatagcaagataaaattaaaatagcgtacaataggctaagtgcagtggctcacgcctgtaatcccagtactttgggaagccgaggcaggcggattacctggtctgcctgaggtcaggagtttgagatcagcctggccaacataatggaaccctgtctctactaaaaatacaaaaattagctcggcgtggtggcacgtgcctgtaatcccagctattcgggaggckgaggcaggagaatcgcttcracctgggaagcggaggttgcagtgagccgagattgccattgcattccaatctggacgacaagagtgaaactctgtctcaaagaaaaaaaaaaaaaaaagtatacaataataacatgacattttgcagatactataaaagtgctctattgtacaaatttatgaaaattaacttgaaaagttagatcaagtgaaaaggatgaatcacccttcaagtaacagtatttactataaagcatacataatgtagtactggcacaggtaaataaaaataggataattgttaaaaagccaggaaacaattatatgcacatacatattatctagatatataactcagggacattagaaatcagtaaggaaaaggaaaagcattattatatatcagctaatgaagtaagcaagtaaataaataagtaaataaataaataaaactggccatacatatgggaaaaatatagattcctaccttccaccataaattactatttttaattgttattttaatattttattttatcaccttttaagttattgggtacatgtgcaggatgtgcaggtttgttacatagggaaacatgagccatggtgttttgctgcgcagatcaccaacccatcacctagatataagcccagcaccaatgagctgttcttcctgatgctccccctttccctgcccacacccgataggccccagtgtatgttgtttaccctgccccaaccatgtgtccatgtgttctcatcrttcagctcccacttataagtgagaacaygcagtgttgggttttctgttcctgcattaattggctgatgataaaggctttcagctccattcatgtccctgaaaaggacaagatcttgttcctttcactgtaaattaaaaaaaaaaaaaactttggagacttattgatgaaaagcaaaacatttaaattgcttagaaagaaaataaaatatttataaacttagaagagagaaaaaaatgataaaaatgtaaacataaaacactgaaaaacttcagtccttttaatttttatgaaggctctgtatgacaaaacatgaataaaactaagacaagtcagagattggaaacagatattttcaaaacccataataaaagattagtgtycagtatacatcaagtacttcacaagtcaataagaaaaatataaccctatttaaaaatgggcaaggggtatgaacagaaggaagttcaaataaccaataaatgtatgaaaacatcttaagtctcaccagtaatcaagaaaatgcatatcaagactacaaagagttaacattatatattatgtttcggaaacatgaatgtctgattacactgtgttatatagaatactgatctcttataaactactaatatatactactcatttaaattactaataatggcaactggagaacaatttgtaatgaatagcattaaagctggacatattctgtgatccaccaattacattttgaaggacctgctctaaagaaacttgtatgtacttaaagagagagctacaagagtgtttattgaaaattattttgaaatgaatttgaggaggtagggtggagattttacctatattatgaagaacttatttcttaaaaaattaatctgaatcaaatatgacaaaatattaacatttattaaatctggatggaaggtaaatgttacattaggttctttacatttctgatgccaagtatgttatgattaaacatatgaaagaagaggcacattatacattcaactgttgaagaatgagttttgatgattttaagaggagaaaaagatataggctttgttcatttataattagagttagtgggtttattatttggaatctttttttcacacttatctataactgggtatttcttcggtgcagaaatatatccatctgcagccgggccagtttgtagcattgactgtgatatacatataaattcatagtgacaattttttcctattgtccatagtgataaaacatgcaaagacatgtagctattcctttgctttgctttttaatatacattagcactaattattgcactttttccagctaatatttattagtgagtttatatcatataaataycgaaaatcagtaattttatccctgagcatcatacatttgtaacaaggccattcttcactgaaatttctttctttctttctttctttctttctttttttttaattatacttaagttctgggatacatgtgcagaatgtgcaagtttgttagataggtgtgcaagtttgttagataggtatacatgtgccgtggtggtttgctgcacccatcaacttgtcatctacattaggtatttttcctaatgctatccctcccctagcctcccgcacccactgacaggcctcagtgtgtgatgttcccctccctgggtccatgtgttctcattgttcaactcccacttatgagtgagaacatgtggtatttggttttctgttcctgtgttactttgctaagaatgatggtttccaccttcatccatgtccctgcatgaattcatcctttttatggatgtatagtattctatggtgtataaaggaccccttcaaggagaaaaacaaaccactgctcaaggaaataagagaacacaaacaaatggaaaaacattccatggtcatggacaggaagaatcaatatcgtgaaaatggccatactgcccaaagtaatttatagattcaatgctatccccatcaagctatcattgactttcttcacagaatcagaaaaaaactactttaaatttcatatagaatgaaaaaagagcctgtatagccgagaaaatcccagccaaaaagaacaaagctggaggcatcacattacctgatttcaaactatactataagactacagtaaccaaaacagcatggtactggtaccaaaacagatatatagaccaatgggacagaacacaggcctcagaaataacaccacacatctacaaccttctgatctttgacaaacctgacaaaaacaagcaatggggaaaggatcccctatttaataaatggtgttgggaaaactggctagccatatacagaaaactgaaactggacccctttcttacacctgagatttatttattcatagatatgtgtccccagctatataggrctctttgagaaaaagattgtactttattcatttataggcccttaaggtttgacatgtagtaatactcaatacatttttgtggaaaagcattgtttacattttcagtcacacaagtactaatgagaatatgttatgtagatgagtcacatgatacatatatacttagagcaaaatataactgttttaatcttcccctttctactagtttgtatagaagtaactaatatcaagatcttggcattcctctgaattgaagttaaatattatgtacatattctttaccaaaatattctacgtactatatattccacccttttgtttaataatcagctaatcgcttggagaacccaaggtacgaggatcacttgaggccaggagttcaagaccagcctgggcaatatagcaagacctcatctctagaaagagaaaaaatttaaaaattagccaagcatgatggtatgtgcctactgtcctacctaccctggaggctgagggaggaagattacttgagcccaggagktcaaggctgcagtgagctatgatcgtaacactgcactccatcctgggtgacagaacaaggtcttgtctcaaaatagtaataataataataataataataatttactaacatcagacattagccaaaggactatcaaatatacatatcaaatatgcaaacaaaccaatcaaaatctttgtacaattaattttttacattaacttacttatgtctcaatagttattttgtttggtctatattcaayactgaaattacatagcttttcaggccaccagatattaattccttggattgaattttggctctgtttttaaaaataattatctctgatataaatagattatttttaaacaaaaatcattcatgtgctaggcagaaaatgtatgatagttaatggcttgatttaaacattgtatttaccttgagaattcagaggaggctcacatagtgtgtgtgttgaggcatgaacccaaagctgcttaaatggattactgttgcatctcaaactcagctgcactggtaggtttccrtcataggagaggctttaaaaataaaattataaaggaaaaggtctgtccaggtactgattatatacagatggaaaatgtctgaaaaatttgttttacttatacagcagagctgcaaatgttatttatctcaatcagcagagcaatggttagagactagtaggattaactgtaggaagctgccacctttacagcagacacatctgcccacagagagccagggaagatggttgtataaatatggcaatgacttcattcagttgacattatatccatctttcaagcaacttttgctactgagaattttatggccattcttctattgagtcttctggtctttctcagtttgtggatttttctattttgtcatagatgcatttgacaaatatattttgagtatctactgtttactgagcatttgcataacatgaacacgagtcctaactgcactgtgttttctacctccaactgcctatttaagaaacaatagttattactgtcataagttaaatcttagctggcagggccaatttattttataaggatcttgtactataaaaaaatttataaagcctcttggtcaggtgtgtaaaaaaggtcactaaaggttcaacataaaggcaaaaccagtaaacaaattgatcaaacatcaaagatctctccaagccttagttttagtgatccatgaagttttaactcatgaagagaatgcaaaaattatagaaagatataaaaaattataatgtcagtcccatcagagtaaattaacatcctttgattctctctatgatatcagtggtttgaaagttcaaggcattttgtctcacctctttattgtctgattctgtctaaggtgttaaaaacaaaattttctaatcattaacttagggatgattgtttatccccgttctttttatctactttagtcttttagttgaatacacttttaactacaacatggcttggaacaacttgtgtgcagaaataataaatacctttacatcacagcaatattagagtaagctacggtcctgctgagtagctctttgaaaactaagcaggagttaccatgtatatttattcgttggatttctgtggcacttttcctccagagagtacagggtataatatggataaatttgcacaggggttgccttagagtgtcaaaaggaaattaaaggaaaggagtgcttgtaggagcatagagcaaaagaaatagctaatggaaaaaccaaaccctggttggcagcaaggcatgtcaaaggaggtagaagaagctgggctaccccaggggtaccactgttgactttttgggacactgaatcatttcaccacagcctatgtatccggtgagcactcgagatttctgttcaatatcatttgaagacccacaataatgatcatagactcatagggcaggaaaggaactttaaaaatatctgcccaattctcttaatttacagatgaggcacatcgaacccagagaaaacaaataaataaattagaagcaaagtcagggtcagaaacaagatcattcattccttgaataaacgtagattaaatgtgttgtgctaagcactgttctaggcacaggagttaccttagtgtgagtaacatgaacatgggttctgactaccaatgtcctgtcttacactgtcttgttctacctccaattgcctatgagggtattcaacatcctttacaatatacttttgttgttgttgttgttgttgattccacagatgaaactctcttaagggatagacctcaagtgactttgttaagagaaggaagttcttttccaagtgtctgcaagtgtgttgacattctttgattcttcattgctcatagggcacttctgtcagatcagctggaaaacatttactatattgagtctagtttgtgtgccactggaaggcaggctttccttgccatcatgagcagtttatttttgtcctctggtaggactggcaaagggctaaaaccttatctctcattggaagaaacagttgtctcttagcattgaccttatcttaaaggtgcctcacataatagtctaaactctaataagataatggaagtagttaatgttagaatcaaatgtgaaaattcttcaaaggagcatgatttaaaagctgccataaatctacctccccaaaggtgatatttcagtcatccactgaacactggatgtcactacaagaaaacctgggtttttttattttttattttttattttttttaaaaagagtagtttgctctttttagtttaacactcgatttgaacccctgtccatcctccagtaactatgtcaaaaaatcgtcctgtaatagaggcctcagttcttttacaggtacaactaatgacttctaaaactacggaccttcactcaggcatttgggaggagacttcatcctgctcactttgcccttggtcccaggccattctctaaagaaataaagtgtttaccttgtaagttgtggataaggctggctggtgggcagagaagtgatattccttggaccaaatggagctggggaggagaaaagagaaggatgcttgtgtttccagtcaccctaacagccctgatagtcctcttagtcctcttggaggatatgagtgggattgggttccagggacacctgtttgtgcctgcaggggcagattcatggtggttctgcctctccccttgcctggcagctctcttccccatgcctggcaattcctgtattggctgatttacctgcgaggctgtatgtggatctgtctttatgtggccactgccgccagcacgtactgtcaagatagagggaagccaaagcgaggattgtaactgcccaagcctagagagggaggtgagctgcctccggacttgactgcagcttcccttcctcctgacacacatggagtttggtggcgacggtgccggtgccgaagaactgcagacaaatacttagccaactggatgtgtgtgagctggctacaaaggcagcgcctgcctcacccggacctcctgctggcaggatgtaaatatacctgcagactggccaaacaggactgccttttctcccccaacccctccctcctcccaccctctccctcagctaaccagcatgagaggaactgagaaagcaacagcctgcaagtgacagctccagcctgattctgttcgtctctgagccgaggtgggaagttgattgtgcggcagcttcattgtgaattccttccattggcatcgctatgtttgcctctatctggtatgctaagaagctgggtcgcaggttcgtgcacaatgccaggaaggcgaaatcagagaaggtatggaatgagtggggttgaaaattacctttccggtttgccaastgcctgctctggaccattggtctgagtacagacgcagtctttatttgcttggagtgagaacctgcctctcactgtgaatgtggtccttgccactatgaaaaggggtaacacttagagcctagcttgcttgggaggggagcattaagggttaagcaagatcattggctattcaaaatgcrtggtgaaatcatcaactgatacagtgtcttcacagagacttaagattcctttaaattacataggatgaaagcaattgagcagctgcartttatgcttgttcagagagctctctagtaaacttgttgctrtactgcattatttttattattgtgatctttggttctgaagtgggcgttataaatacctgagcctttctctagtacatgtgttacagtgtgtgtcctaggaacatatatctgggactctcagtaacgttgaccagactctacaggggtgcttggtatcttatcactaagccatcgtttcaaaagtgttcacaatgagcaagaattatatttataatcaggtagttgtggccatttaaagaatagatttgcatttcttgtattcagcatgaccagtcatttccagagaatctctgtgtagacttacctaattagttatatttccctgagaaattaaaatggcctgtaagtcctaaggtatattacatgcttggagataacagaagatgatagcttacatctctaattctccagtgctttctggggcactgtccaaactgtcatatttagggaatcaatatccaatgcggtaggcattggggaaacttccaaaggtaacaaaatcttgtgaaacagatttttcatattcctctgaggatatgatcttcagcccagtatctttactgctttatgtaaactcatgagattgacccagagatggctctcctggcctgtggcacagtgttttctctcacctagaaagatgccttcactataacttgctattcattccttcagagtggaaatgataaaatgaacaagaatccagtgatgaaccaagatacgaatttttttagctttagaagagaaaatatcactggggttctgactttagagcctcttataatgtccagatctgacaattttagaacgtaactgacttgttatttaataacacttttggtggatgagggaggggaggattgggctggaattggtctcttctccactctatatagcccagataaaaagattacaagcctaactattatgtgtcaactagtatcatatatattgaacagttggcttttgaggttgtgttttgttttgactttcaagtaattttgcaggaaagagacttgtaagtgggtcttttattggaacaaatgttttagaaaagtcctttcttcctataaaaattataagttgtatggatgagagaactgtcagagaccataaatggctctgacagccactgggagataatgtcttatgccaaattagtatgcaaagaaagttgaatctcccagaagcacttatttcaagcctggacccaaatgtaggaaatagcagctctataaaattcagtgtatagaacctaaaaagacattgatacaacaaagtaatctgagcttctgcttcttaaggagctagtaaggggytttcaatctgtcccatccatttctgtgatggctaatgtttaaaacaagccagaagaaaccaagtttgattttaagggttcaaattatttaattaccttactcagagagtaagatacatttacatcaggaaatctacattagagaactgaaggtttgctctctgagtgacaaagaccaaaggaaataacaactctactgcctttgtgctaggaagagagctaggaggagttaattttgaacattaggtcatgataagcaacatgaaataacatcttggtattttttaatggaatttgtattcacagagttcctgaaataaattaaaaggtgtgttgcctcaaaaaatgtaggcactcagtcgatgcctggtgaatggaaatagttcatttattttgtatacctaattttataacatagcttatttaaaactataattttaaattaatttttttctaagggttcagtatgtactttagctgagaagacagttaacaaataatacaacaagctgaattaatttacataatgtattcctataatatcaaagatcatatagttgcaaaacagtggggcatgtaaagtgctactaacgatatgttgccatggtttatcaacaratggaagaagatgtataaaataagattattattgaattttgtttagaaaatgaccagtatacttaattgtgaaagatcatattttagcatttggggagatatatctttacaatggacaatgattgtgatttttagtaccctctataaattytgggcttttytttttttttttttttttttcagtaggtgacagtttatttcttcacactctaataaaacaacctgaactcaccatagcccttcacttctattttaacactgaaaagtattttcctcaaggttggggttaattgaaaagctcttaataattaggaacatgcaagactaaatgccatcctaaacactcagtgtgacttattactagttgtcttgtctactgttttgcctcagctaatgtcactagaactcagtagcatcacaaaatgaccatcataatgctcacaacaataataatattaatgatagtaatctccatacagcttatacattagcttctttatacataaaatttaatctaattatcacaacagccctattaaatagaaattatttttcctgaatcctagagagaagagtagctagcccaaggtcacaggattagtggtaagtctcagtgttgggatttgcaccaagtcagcccaaggtattccaaaactgactccttgtgtctctagcgccttcttccttccactcatcattcttctagatccactaatctgtcttgtctgaataaggttactcatcttttcttatcttgtccctctcttttatattagaatttcaaagtgataatgtttacagaatcaaagttactgattgtgtaactcaacctctttatttcagataagactatacataaactatattgaataaacagttttctttcatgttgttaaagattttacattctttgtcctctatcattggttaagtgtagcaaacttgttttgtcacctattattctttttttttttttttttgagatggagtctcactgtagctcagactggagtacagtggcacaatcactgcttaaactgcagtctcaacctctccagactcaggtgatcctyccaccgcagccttccgagtagctgggaacacatgtgtgtgtcaatatgcccggctaatttttgtatttttttgtagagatgaggtttccccatgttccccaaagtggtctcgaactcctgagctcaagtgatctgcccaccttggcctcccaaagtgctgggattacaggcatgagccaccatgctgggacacctattattctatttgaatagcttttaattgtcatatcattttaaccttaacgttggcatttgtactcattgcttattcctatagaatccaaaaatgtctttaatcaaaaaggacctaaatgcctggcaattgtacatgtgctctctttttgaaaaaagtcaaagatgttaggtgattcacattgacatttttctaaataagctacataagagattctttgttattctttcatttaaaagttcatttgtaccaacaaattctctgaataaaattattttaaaagtgataatgtgaaatccagattgcctggctgggatagaatacctccattcaaataattattcctttcttctttgttttgaccctgtgtaagtaattcagaagttagtatcttacttgtatgcctgttgtcacgtttcaacttaaatctcttaattagacaatctccagattgtcttactctaaaaggccagttgaagaatctttaagataaattgaaagtgcaatttctggttacgtagtaatatacaagagtattaaaataccaaaacttgtgaaccttcacttccccgtcagcaatatattgcttatttcatttgttttgktttaatttttatatttatctttttagtgcacattatgaaaagtactttcatgatgcatttaggaaagactagtatcaatattcataatctaacagacacacctgtagatgagcttggcagtttataacctatgagtgatgtaaccaaccccacatatcctgacattaggccatactcaccttggaaaactttttttgaatttttttgacagggcctcactctgtggcccagactagagtacagtgatgtgatctcagctcactgaaacctctgcctcttgggttcaagcaattctcgtgtctcagcttcctgagtagctgggactgcagacatgtgccaccacagctgactaattttttgcgtttttagtagagatgggctttcaccatgttgcccaggctggtctcgaactcctggactcaagcaatccatttcagcctcccatagtgctgggattataggtgtgagcccccatgcctggcccaccttggaaaactttttaaaaaccagcacactagttctactctcccccttgtctaaaccaaacacattaattcaacaaaaactaaaatgraggataaactagtaatacatttgctggcagtaggaccaaggaaagagaattatgtcctggtgatcttagtagaatataaggggcaccaggtttcaggcaaggatttagagggaggggattaaattagccttgctctttgctatccagcctgaagtcagtcacttggtttctctggcctcagttttctcatctgtcaaatagaagtaacatttatgcttcagtagatctccaatgtcctcaagacagtgttcaaaccattaatataatctacaaaacccatcatgatatggcctctgctttcctctctgtcatcataccttgtacctcttctatcagcactttaaatccagaattctgaactactttcaaatccctaaatggcccatgctctctctagcttccaggattttgcttaatctgtttggctaaccagctaatcacagcctggctgtatccatcacttattccactctagccttaggtgacatcaccatcactaggaaacttttcttggcctctaaagcccaggatggatctatcatcagctcccacagcaacttgtgcatttgttgtaattatcttcatttttctacaatcctcagtagatttgaaatgaatgatttctcaatcttattcaacatatttctagggtctaaaagaatgcttgacacatagttgtctttcgtatgatatttaattgatttgargttgtcatcaattttgagatgtgtcattatttcatctattactaaaaaaaagattgccaatgaaaccataacacatcatgaattgcaagatgcatcttgatttcacaggtgttaaaaagtgaaaaatatttattcttagaattaataatatatgacataatggtgaagaatgaatgatttactttgaggataaaatgagttaatataaataaagtgtttaaaatattatacttgctatcaaattatttttatttatctggtaatattaataatagttttcatacagagtattatatggaacactgagatatatcatatattttgacttgtgccagtcagactcaacaaatattatgtgtcctattctgaatttaggaaggtaaatgataaaggaaaaaaatgaaaattaacattatgaaatgaattaaaagatataatcaaactggaaccatttagattgcagaagagaaaacttaagaagccttccagactcccactatatatttatatgtctaaacaacaatggttaatatttattgaatttgttctatgagctgagaactgtgaatataaagacccagtgagattattactactagtttttagagagaaaacatatcaccagtaggtgactatgattagacatcctgtatgattctagaccttgatctcctcactggtagataatactctgcttctgtatgtttgcgtatactatatattgtgtgtgtatatatatgttatgtgtaatacatattatactatgtttataaaatcatgtaggtttatgatgagttagatactaagtttatttttcctgtgaaaaataaattttaaaaattaaatgcaaaatctgaaatttatctcaggcataagtagtgtcctgatattgaagattcaccagtcctcagtgatcattttatttctatttttgcctcatagtagattgaagagtggtctgacctggagagaaggatgaacagattgtcctcttagatccctttcttagaggcttgtgagtctctcaaagctcctcagttgtgagcagcagcatgactcagcgccagtgtctgcctagctgtggtgacagagaggacaggtgtttgtccatgctgaacgcagccctgctgcagttcycctctgtcacctggaaggtgaatcaagcagcaaaatggacagtagcacctgttctgaggtcccagaactgctgcccaccctggcagagcaaaaagcacaactgttataaggtcagggaaagtagacaaagggcaggatcagagaaatggccaaagtgaaggaaggcaggagtaggctggagggcaagatagttggtcacaaaaccactgtaaaattgtgactagttgtaggaatgactattaagcagtttactcgagcattattacatgtattttacacataccatctcatttaattcttactacagccttctgaggtactcttattrgctgcatttccttctcttttttttttcttttcttttttttttttgagatggagtctccctctgttgccaggctggagtgaagtggcacgatctcggctcactacaacctccgactccctggttcaagcaattctactgcctcagcctcctgagtagctgggattacaggcacccaccaccaagctcagctaattttttttgtatttctagtagagatggggtttcaccatgttggccaggatggtctcgatctcctgaccttgtgatctacctgccttggactcccaaagtactgggattacaggtgtgaaccactgtgcctggctattagctgcatttcatagatgaactaaggtataagatgttatgggattttgccataggtcacaagtggtggagccagcattcaggaacaggtttactgaatctacagcctgtgaccctagccccaactcatattttatgttcttctttaaacctaccttcagttggatggacctctgatatggagaagagataagctggaaatgagacctgacttctcagttatggtccttcagaaaccaggtatccagatagccttgtttcagtctagtttacaaaactttaattgcatttttttcttaatataactttagaatgatattcctctacctgatattgttgagtgatattacgttggaaaatgaagatgaaaggagacattctccaacacagcaagattaatttaagcatgattatcattgtaaagataaatttgataatcagataatctgcatgttttatttgcacatgtattgcaggaatgaggctattagagaagccatcccgctttaaaaaatgcctcgtagtatttgcttatatctgaggtagtcttatttcctcaaatatcttattaaatctttaattattaaaccattataaattctgtcctatttggtctggacacctagcatctataaggtcctaaatgaaccctggttggatgattcacttggatgggacactctcagctgtattaagtataggaattaagaccagattagaggtcagtaggcctgggtgttaactggctctgccccacaacctgtgccaccttggttaagtgtccaagctttcatgggcctgagttcatctgcaagcagattcctccccactcaaacattttttgattctaattctgattttctataagactgcagaatccttaaagggaaagatttgtactcatttgtctttgtattctcagcacctagcaaaacgcctagcactagatgaaacagaacatttatgccaaatgactatacacaaaaggtctggaacttccttgaccattagtaagaagaatgtaaaggagactctgtccaccttcaaagtgagagcaagatgaaaaatgctcaggggctcttctttttcaaatgccttttttctttggagaaagaggaattatgaggcattttatagcattgcgtttgaggctttggttctcttcctttctcaccctccatgccactaacactgaagtaaaacaaacagtaactagcataaagccagagtcttcttcagccaccaacaatgacatcaaacyaaaattttccagctgccttatcccacatgccatatcattacaagcttatagttgaggatgaaatgtttattgtttgaacactctcaatcctaaaattccagttatttagagaatctccatcccacctgctacagactgaattgtgacctccccaaattcatatgttgaagctcttgtcctcagtgtgactgtatttggagataggacttctaggtggtaattaaggttaaatgaggccataatggtggggtctgaatctgataggcttggtggcattgtaagaagcggaagagacagatttcttcatctttgtctccactgtgtgaggacacagagaaaaggcagctgtctgcaaaccagggaaagagagctcactggaaaccataccctgatagaaccttgatcttatacttcccagtctccagaactgtgataaaataaatttcttttgtttaagccacctaatacctggtattttgttatggcagcccaagctaagggcttgttataccacctcccaccattgtagatatatatgatgatgtctaataaggagtggtttttagtgcccaaggccagcctatcaacaccgggtagaaatagtgttcttttttattcaaaatatgtaagttctgataaacacatggattcagcagagttaacaccactcaatcttttgaaggagctatgagaggttatttaaaatggtaatatattttttaaaaaggagaagtagagggtaaggggaatgaatgaaatgcttttggaggatagctttggttgtctttatagttgtctaagctacagaggaggcaaaatgaatgcaaactattcacccaacaaacttgataaaacaaaaaatacatataactcacaaaatacttttcttctcttccacacctacttgttacattaggtcacactgatttacaaacaattgattgattttccctatcataccattcactgttcctcacaagctagtcttggagaaagttcctactatcagaagggctggtaacttttcaccagggtttgcagcaagaaatgacaaaacaagtactgttagaggtattgaggtccgtggtattcctgtgcttgttagcagtgcagatctatgtgatttgacagacattttggtgattccctagcatgggaggggtaaaaatgtattttctgtggaaaggaaaaaaagtatattggggttaggggagttgaaggagggacagtgcttgggaaagtttaagaagattgagaaaaataagtctttttcttgttcctttcctatttggacattatcctggcataggactgactttcctatatatttttttccccaagattcctgtaaaagttctttgtcatcttcgttgacttctgtcctttacccattttgtgaatcctcttattggcacaccacccaagaacagtmaggcagtgaaagactgtagacctggcttcaagactggttgggtgaccttgagcaaatgactgcacctctttgattattagtgctctcatgtattaaaaatggtgataaccaccttttcatgggtttatgattcaattaaaactgcatgtgaagaatctacctattgtaaaaactttttcttccgtacctcctttctttcctccctccctctcttctttccttccttcattccctttttcctttcttcctaccattcatttaaatattctgcctagttctagaaagaatgaaaaatagttctgctttacctcttcaccaatgatgcctcttactctactatccccctgggcttccgaatgaactttctctgtcaccctggttttataaaatgaggaggtgtgtaattatatctctgtctttggctagaggcagaaaatgactaagaagaacatctttctttaactagttggaattgttagtataatgactctgagagagttctaggtttttatttccttttaaataattttctagatcctccttataaaatattgtccccctgctcccagcctttcccatacattctctctttcaaaatataccacccaacttttaagagagggattccctgtttcgtgagtgccagttaagacatatcacttctcctttgaaaggaagtattatgtgctgaatgactcaagatgcttatcttccagctgataaatgtatcacttgacgtttgttgctttatttcaagtcttgggaaaaaagagaaaagagtcccatgcaatgttacattgaagttcaaaactagaaaggaccttcctttcgtagataataataataacattaatgaacatttattgtgtctttactatgggccagtcactactctatgattttatgtgttctaatttagcaatattcacaatggccctatatgcaaagtactattatatccacatttttacagatgaggcaaagaaaggtcaattaatatgtccaaagatgcacagttagcatgtcctaatgccaggatttcaacccaagctatctggacctgagtccaaattcttaaccatgatgctacagtaacttctcatgcctttcaaatgagtaagctgagtccccaggtaatatgaggtttaggaatttttttggtccaatatctccccaatattgatggccaagttttggggatttgaacctagatattcgcaattccaaacttcggcctcattggcttcatgcgccactaagatgtacgcccctacatttatttctcatgatcaaatattgaggagtttcaagcactaccattaatgtctttggtaaacagtacctgctaagttcctctttcatttaaccaaaagtattattggttatattcatatttttgagtggtggtattgataatctttcatgaaattttcagttatataattgatgtgactttaccatgtcttcagtgccctgcttccattaaaaaacaacaacaacaacaaaaaagtcacccaacaggatggcatttggaaaacaattccacaccagtggttgcattaattgctactttgaatgttcctgctgtgaattgaatggagtcactttggatctatttcttagaaataacaatttttattacctctgctctaggatgcacagttttgagatcttcagaggcaaatatcttcactaaccactttctcttttctgttttctttccataagtaatccttttcattgttatgactgtttttaatgttctcagatttaatttatgaaggataggggatgttgtaggatgattttgtctcttgttatctcagcatatagcattccgttaacttcccaagtataacattttgaatatcatgtttagttcaaatatccattattttattaaagttgatgtttttctttatgtatatgtagaatttacaaaggctttatgaaaatggcttttgtaatacacaagtaagaatttcctttagcagtagtcatttctttagtgagtgttttgaaaaaagcaggataaaatgtagtatgatgaataatgcttgttagcagttatcagctacactatgccttttagaaagcaaattccaatacaatccagattaaataatgctttccattctccagtttcttaaaatcacctatgtagttgtcctgaacaatttgaaagtcatatcttctctatctttccaggttgactgtagactgaccccaggaaaataaaattcaggtaaataaatcatctgcagcctttgaagtcaattaacaattcaacaaatactcatttgccccttggtattaaaaaatacttatttgcacagtaatattaataatactgtgctgggacttacaatgatgcatggatacagaaatgatccagctatggtccctatcctagggaagtttaggtatagattggaaaaatctaaaaagaagcatacacwattaaggcaaacacttagcaaactctatactgcttaaacagtgtaaacaatatgccagtttttccctcttatttattctgtcttgcccagaccctctttgcttatttgctgaatcttaacattcttgagctctgtgatcatgcctgattgcacaccacctggtatatcattcattcactgagccctgttctccaagattagaataaaacacacgtgctttgattacattcttaggaagcacatgtgaatgtccataatgtccttctacccaccccaaaaaatgccttaaagaaactgttcttatttttaatacttctattaaaatatattgatacataaaagtagagtatttaagaacatggtttctagatccaggtttccttgtttcaaatcccagcactgccatttactagctgtggaactttgagcaagttacttaaacctcgtgtgcttcctcatctataaaatgagaataatagtgcctgtctcataggcactattataagaattgagtaaatatttttgaataacaggtattacctaagtttttttttaaatgaatataatgtgacaagtcattaagaaagatattatggggtgcatacaattctttggagcttctcagctaattggccaactmtttcatgtcattctctgcctctgattttgacctgtagtaggactattttgaacaactttgtaatcacatgctccacaatatcagcatggatgggcaagcacatttytgccctaatatagcaaccttgagtttcactgtcactgagcagtacttttggaaggtgactctgatttaagcagttgatcttaccagagatactaggattactgtcatttgattgttgagtcattaacttgaaaagcatctattcaagagtgtctgctttgatatctacccaagagagcatcatctgtggaggtagggcaatggcctctaattagtataatagacttctgtctccctaaagcaccagttctgcttttgaaaataagtcagtgtccagcatcactatttgttgctcaattatatagatacttcaatgtgtttttctgcatttatggactgtttaatgtttaatggaggtaagtacattcaaatagcagaagatggcttactgttgcatttatgattaacattgtatgttcttgaatgtgtattgcctatgtatgttttcatgtcacacctatttataatttatgtaattgaatcactagttgagcaaagaacatgtctttctgaactatttttttaaagaaactggacactaactttgagtaattaaaagataatctaaacaatctataaatgaattcatttaagagctacctcacagtatgctgagaagctgggatgtgatggtgaacatggcctattcagtactcaacattcaacagtgtatgaggaagacaacaataaaggagcaattgcaacatagtgtgatgaatatgatgtgtttagggattttatacatttccattattgattgagtaaatacttcataagtctgtgaagtagtccatcttagatgataaaaagataaagtaggttggttgggattttattttttaacacatcagttacagtagacaagtgccaggcatgacatggacacagttgaatttaagtcgaactattaagtatcttagtgtactaagtgagacaaaatatcatttagttatcaaacctgaatgtattatttttattgcgataaaatataaacataatataaaatttgccattttaatcatgtttaagtgaagaattatgggcattaaatacatttgcaatgttgtacaaccatcaccactatccatttctagaattttcatcataccaaatgaaaactctgtacccttctgaatattaacattaatgaaaaaatgttcagaccttccccatttgaccttgccataaaatgtgctgactaatttacaatagttccatctaccctttacagttattctgagaatgtttcagaaatacttataaatctttcaacttccattaytactttgataagattttgtaacaagaaagcaggagaagtgactttgggtaggtctagagtcatgatgtttaagcattttgttgcaagtaatacaatttaatttcaactaagtacctttagctttactaagattagtaattaaatatttagttgtatactaaattagctatgccatgtggtcactggaaagtaggtactccatttactggaacataaatgttttacaaggtattgtaatataactagtaaattaataatgacaatttaggtttcagctaattaaattcttccttagtatatattaatttgagggtctaaactaaaacaacttcaactatgataactgctgtaatgatttagctgtgcccaatcatgaataaaattgggaaaattgaatgtgcgtaatgagttataaagataagttagtttccaactgtctttataaattttgattggcaaatctaaaccagaattaaatatgcattaaggagagagactttatggtcaacttcatacccttattcagacagaaaatttttcaagaggattgacaccattgctatagcttacaatcaaataaattttaaagagcatgaccaatgtgcccagaactgcggtaggctattaaaacatcataattaagatctctgaggctcagttttgttgctattgttctttttctaatctgtaaaatagggatactagaggtaaatcacgagcataacagtgctgcatacagtaagtgctccagagtcaattcatttattcattcactataataagtagtaattagaatgaatgatagatgcataatgtattctcatttaagtatctaaaaataaaagagacataatttgcccaagtaccttcctcaactctgaagagttcaagcgcctagtgagggagagatatgtttgagtggacgaccatatagcatgacaattcaagtgtatttttcaaagttgtgcgttatagaggtctctagactcaacacaatttgtaggcacaacaggagaagtagacagaaaggagtggagccacaggaggcctcggagaggggatgatgctcgaaaatacttaacataagaagtttgacaggcagaagcggtgagggattcattccgagcagagaaaaagagcaaagcacagattcctcaaagagcatggctttttcatgaagctgcaggaaattcatcttggcctgagcagagcaggtacacaagggaatgggaagatgtgactttgcttaggtcagctggggccagatggtaaaaggtttggtttgttatctaaatagtacgaattatttgatggaggatggaataacagtgtcactgatgggttttaaggtgagagagaggttgataagatcagattcagattttagaaaaacttatctggtagcagaatgtggagagtgtattagaaatgagcaagagtacagacaaggagacgctttaggagacgtttacagtattctcaaactttagtgtgcatggaaatcacctggaagtcttgataaaacacacattgttgcactctacccagagagtttcaaattcagaaggtctgcaatggggaagaatttgcattcttaacaagtttactggccccgcttgctgctctgggatcctgttttgacaattgcagacataaatataccataaaagcctgtcttaatcagtttgggctgctgtaacaaaataccataaactgggtagcttcaacaatatttatttcttcacaattctagaaactggaaagtctgacatcaaggtacaagcagattccatatctggtgagagctcacttcctggttcatagacagctgtcttctcactataaccttacaaggttgaaggggaagggagtgttctgggaactaacttataagagtaccaatcccattcatgaggctccaccctaaggacttcaagagctccacctcctaataccactgcattgaggattaggtttctacggatgagtaacagaaaacaagcattggggccgggcgcggtggctcacgcctgtaatcccagcactttgggaggccgaggcgggcagatcacgaggtcaggagatcgagaccatcctggctaaaacggtgaaaccccgtctctactaaaaatacaaaaaattagccgggcgtggtggcgcacgcctgtagtcccagctacttgggaggctgaggcaggagaatggcgtgaacccgggaggcggagcttgcagtgagccgagatcccgccactgcactccagcctgggcgacagagcaagactccgtctcaaaaaaaaaaaaaaaaaaaaaaaaaaaaaaaaaaagaaaacaagcattggtcactgtgctgaggcagtgaaatacaagcggcaaattaaatctcattctaaaggcctgattggttggaagcaccctcgtgatacattttttcctcctgaaattttgcttgaataacacaatgccttaggcatttgatgatgctggtgggtgtkgggggaaataaagtgaaccagctgttttctactagggtcagagtgagtaaaagtgacctgtggttctcagtgactgttaatgcagtaaatatccttaggaatatcgtatttcaaattccactgttttccattcagagtgggggaagaaagggacttgtctcttcacagagttggttatctaagcaggttgctgtctaacataaagtgcggctcttgcagtcttgcatatttcctccgttttcagctatattatggtcaaaggagaacctggctgagttttacttgtttcaccatttcagattttttatttttaaagtaaccgtatactttactaagaaggtttacgtgataattttcttttggttgaacaagatttttctcctgtttctgtttattctgtgtgtttgtttttaaggcaaacatgatctctctaattacctttcattgtaacgaaggtttctctttcctgtagccccagtgttgttctagtgaaatgagtttcatctgctgagtgtaggaaaaggttttaattgacataattaacactggtgtggttatctccaatttaaaaagaggtagttgattcttccagaatgtgaaggtattgcctgatagagccaagcacgcagtgtgtaataatgaaggtagtttgggaagaattttctgctcttaattaggagcaaaatgggtagccttttgtcagcaggaggctcaggacacaggctaattgcgatgaatataatgggattacctcacacytgagatggtactcgcactaaaggggcacagagccttccctgcaaatctgcactggtctgggggtggggatcttatagagggatgttttgaagatataatttattgtctagttcggaggacttttttcccttctttctgtgtgtctgtcttgaaagagaaatgatcataaaattatcggcatttctcaaacgtgtttttaatggaagggcttttcagggttgttttgtatatgagacagtatgttcaggatgttctaaatgatgtccagaataaatagattttacttctgtaagcacttggtgtgattgcctaatattgcagctcataaatgtttatgaaggtaaaatgctattatattagtttgtgtaatttctcccaggcataaggatagatattggggagatattattgaatacaaaacgtgttttgaaaacatgtatagaactttaaatggattttaatttcaaagtaagcacaagtttgagttaattaagcaccagtgatcttacacaagcccaccaaattgagtaatatataatatctctctctctctctgcctgtctccctattcctcccctcttttttctccctctcgccttctcttttctgtattttttcatatattcacaaaactttgagttgtgtctaccaagcaatgtgtagagcattaagtataccaggacagataagagagaacatttgcccttaaggagtttacattttaatgtaagaggcaggcaagcaatttgtgtctccaagtcaaaccaaaagttttgcatatactaaagagggaatacatcattccagtctaaaratagagaatattccaaggaaaatatggaaaattaactgattataaagaagaaaaaggattttgataggcagaagagggtaggacagcattccagggtgagaaaacagggaaagcaacgggataagagcattttagggaacctaagcgtatttattctaggttgagaatagggtatagaggagggaactaacagttgcatctgggaaggaaggataggaccagattggggaaagccttgcatgctgtagtaaggaggtagcagcacctaattgcatgaacagaaggtagacatggtataactaattcaaaaaccatttggacaagaaaatacagtgcaataatggttaaaagcatggactccaccaggatttcaaactcaggactttgtttattatttaattttgagtaagttatttcatgactctgtacttcatttctttcatctctaaaaataatgatacctccttcatggttttggtataaggacgaaattaaatggtgtatataaagtccttcatatatcatccaactattattctggactagtattgttgctcttctttttatcatcttttccactgtcacttcacattgggacttttcagcccctatgtgttcatagaactaaactagaaaataacgttgtattctggatcttgtaagtcttactatgtgccaggatgtatggaaagtattagcaacacagagatgaataagagcccaacatacaaataaggaattgtgctgccgtatggtagcaccatatgcaaactccttttaaagtgcttttgaaatatgaaccaatcactacgctctaaatggttatggtcaaagagcaaactcatattatcttaagattagttataagaaacttggacattgagtttggctcttaactcagtatattaatagacagcaaggaatttatttatattacatgtaaagtgtataatttagcgttgagagatactgtaagagtataatcgggttaagggatagggagataggaagtccattcccaggtgttacagtgtacaaaaagaagttcagttttataagtttcatccagaaaggcttcctgaataaagtgagattctaatgctgtttaaaagccaggaaaataatacataaaatggtggggaaaaaaaacacgtcttcatgaattctgtcattgttttgaagaaggcagaggcatccagtgagaaatgaagagctgaggataggctgtgagatgacatcttaaagaactaaaggggcaaggtgggcagagaagatgggcatgggtcagggttgggtatgtgtttgtggcaccctagcaaatggctgtagactcagacgaagtcatcaagagccttggattttcaaactgacctggaaggcaaatagatgattgtactggggagaaaggaaagtacygatgagggactatgtatgayttaaagaaggctgtgatagtttgggaaagagatggactttagtacaaggagaaaagggaaggaaattcgcatgtattgagcacttaatatgtaccaggcataatgctagatactttccatgtcttgttgcatttcaacctcacattaattctgtggacagatactattatcactgttttataggaggggaagttgaatttcatttaaaatgactttcatagatcatataataagtgtgaattaagaaatccaagcaaagtgttcacaatcagaaagtctaaattcagtgtttccgctaaaccacagcatatctccatccatccatttattcagtaactaatcacagagcccttactgtgtgctggacactatgttgctgtcttcacattcttgctgttcaccaactagctgcctaatcatggaatctgcatttctgtgactgttttctcaaatattaaataggcttttgtgtggctactttatcagtattcgtcgaatccaaattcatatttcaataattataaactaattgcaatccattcttttcaattccccaagaaaacacaaaattcaatatttggcattattttattagtttcattccattatttctgttatttactgtaatggttatgaagttgatattggtataataatgttgataataacaatcttttaattgagcacatatactgtgtgagatcttgtgttaatgtaatgctttatattatctcatttaatctttagcagaagtgcatgagttggaacaatttgactgttttatgtatatggaaactcaagcttcaggagcttcaatgactttgctaagatcacacagttaagtgatagaccaggatcttaaatctcaaaatgtcttatcccaaaccacatgtttttaatcgttaggtgatattgccttcttatctagcagaatatgttattttgtcagagtagtcagttattcagagcatccttgctcccagtgaactttcattctaattcatgctctttggagttggttactgttgttttaaattactgtgcttgaagaagacagtttcattttgcttaagtgggaaacaaggaaaaaaaatcagttttgctgtacatccatagacatctcagcacacatctctggaaacactgatttttcttggatggaaaatgtgacattcagtttctttttggttggggaaattcttaagaagcattgaatgttagtctctttctctctctctaagttactcagaagtaatattgtggactttatttttgacagatcttgtgaagaaactaaatagaacaaaaaattatgaatatagggtcatgaaaggatattggtatcaaggctggagcacaaaatggagaagggagttttattaatcttttgatgttttaggttctacacatttagaatttgagattaagatgaaaggagaaagaactggaaagaagccaatgattagtttgcaaaaacccaaaatagtaattaaaattattagagaaggaggaaaaaaataacagcaataacagctaatatttattgatggcttatgatacgtggcaccctaggcaaagcactcaacatgtgattaacttatttaatcctctcaatgcatatatgaagtaggtactattatcagtgctgtatagatgagaaagtgagttttggagcaacaaaatgacctgtaaaaggtcacacaaccagtggagccagaagtccatttctgtctggcccaagtgttttgcccactgattaccatcttgactatcaaaaaagtgagtcaagcctgagggtctgggaagaagccccatgtgtttcactggcgctggccacacctatgacaaatctccactttggaatcacgaatcctaattcttagaattatgacaatatgcattcattgataatgaaaaaacttggcctttgtagtctggcagttgtttcatctagcggcataatcttcagaaaaatgctttactgaggcatacttctataaaattggggaaaaatgaagattatataagatgaatagaaaacttctatattagtgctttgtacataatgttcataatggttcactcaatatgataataatatcatgtgtttaatgcaatagtttgttcccagaaagaatgcttaataaatggtgtctgtggattttgcattgtgattcttaacaccctgtgattctaggaaaattagcaggtgcrtgcaatgacatccatagttcttctacccatagagaaaggtcatctgttcttactaataagaatcacatttccagaacaagttctgatatgtgacaataccacagtaaatcttcttagaataacatctttattaaataaaagctgtttgcctttaggggaataatagtgcacattgcataatcctctgctttgcatattgaaatttggctgccagaccttgctagaggaattcaggaagtgtcttaaagtggagaacgaccttcacatttttataaaataaatgattaatgtggggacaattaattccacccatactctgttccccaaacagctttatccatcttgaaaaaggtctttcactttcaaggataaaggatacatatttttaatacaattgtgaacaatcaggtatgtaatttatatttgctatgcataataaaatacataattaaacatcattccataattaattaaggcattaaaacctggaagtggcaagaagctactttgcagcagcatcctgagttgggagattgtttgtaaatagtcgcataatattaggactgcttttatatctgttttattttctccaagtgtcattagatagatcagtcttgattatatactgcatttgaatatgtgctttaaacagagtgaccaaaggatactcatgtaagccgttcagataaaatctagggaggaaaacgttcagtccgaatataatacccatttcaaaacaaaccggaatggaatttactatgtatattattaagatggtccaagttcgtccctcaggcagtttgtggattgaatccctacagcacaaaaataggagataagccatttcttttatggttatgcagcaatagtaaaaatagaaagttcagattcacctacctgcctgtaaatcttgtcttctgtgacaagcaagtagtttatcacagttcagtgtagtcagactatcctgaatactttattgataataatgattataataaaatgataacagtaaacatttgccagatactatgttaattaatttagatatgctcacttatttaatcttcacaatagtcttaaaaggttaatattgttattcttgtgttacagacgaggaaactgaacagttaagtgacctagaatgtatacaatagcatgatctatcttatagattaaaagatgagaaattgaagaacatagtacaaattgcatataattgttttctgcatatataagagatgggtgttttgtcgaattggcttgggttttgcctttgaagtttgtgttgctattatgataaaaagaactcagcacataatagttgttctatacccttgaatgaaattgaaggttcccagccagctctcagctagtttcctcctggaggagtcagaatgtctgaattgataattatactgaagaaaaaaaaatctgcattaccatatctgtcagggagaaggatggataagtgcagaggaaaggttcactgagctgccctcatcagggataatcatattccttattttcaagtaatgtcccatttgatagctgatgtcagcaggtgattgagtgtgttctgagaacctgtgactgaaccctgcagggattttactaagtatgaaaggccctcaaaacaaaaagcagtctgggaacaggtaggttggagatttgactgtatttatttcatattcccatgaatgcttcatgtgtcttgcaggtgagtttacagtgaggacacatcacatttctggatctctttggtatctacccttgtgctaccacaaaagtgttgtctctgtattttaacctctcaaggctgcctggcattcttcaaatgcaacagcaactcaaatatcttctgcctttgtttatgcctcctctttccttgggaagatcattaattatttcttaaaacccaattgaaataccacttctaaactagtagttcatttkactccgtgctttctgctgttctttcatatcagcagattcaggtggagacatgatggttttatcatgagacatatagataaggagagatagaggactggaatagacctaggtgggctctggatgtgagaatggatccaggctgagacatctgacagcaagaaatagatccagtgaatgagacagtgacttctgagtctatgagcctaactaggtcattcattcatcattattcagtgtcaggcattgtgtcagtaggattgaaagacttatttctagctttcaaattgtctgtaccagaaggcatgcatactaagaaatatattataattcagataataataggtgtcattgttaccaagatgaataaaagaattttccattgggttttcagataataactggaggaatcttagagaagtatacattccaggaagttatcttggaggtttccggtaaatcccagatgctgggcctgcagtcctcagaacagaggccactagagtcagccaaggcaaaactctattctgggaactggaatgtagcagaatgaggaaaacttaaagctcaaaaccatggagccttaaggcaggtgcttagcttgccaccagagcaaactgggaacagccagtaaggaagggtggctggtgctcagctccctcacctagggcatgtggcagtttacaatactgtttgtcttatgtccatattggttggatctatctttttgtaccctaactctgtcacttagtagttgtattactttgggcaaatctcttaaccttaccaagcctaggttgctttgtctaaagtggagattaatattaattgcttcttcaggttgttctgagtaagtgaacaaacatttaacttgggttcgcacactcctccattatggcatttccatctatatgtcaatagtgtagaacttgcactcctctgtcacactgtaaaatcaagtacatagtatttggcacaatcagggtatgttgaacaaaagaataactcagctagaaaataaatgtagaatgtccccaaaatctatagcaaggaataaagtcagtctatggtttgttcatttttatgaacatttttatgaactataacatgcatagtagagtttcaatttttgctgatatcatcatcacattctcataatcatcatcaccatcactattgccattatcagtattaccatctgttatggggcagactttagctaagcccagctatagggtgctaaagattgcagatgtaggagcttgggttcgcacactcctccattatggcatttccatctgtatgtcaatagtgtagaacttgcactcctctgtcagactgtaaaatccagtacatagtatttggcacaatcagggtatgttgaacaaaagaataactcagctagaaaataaatgtagaatgtccccaaaatctatagcaaggaataaagtcagtctrtggtttgttcatttttattttctaggatttgtaagcttaagtaaaggaaatagtaagcaataactgtggcatgataatgatacttgaaatgcaatactatgtgttgtgtaatactatgatactatagttgctttgtttaggactactggacatgatcttatgttctctgcaccttacaaaatgaaaatgtgtttcattctattaacaattgaaccctagcttactaccatccacctcttacttatttctcctacgttaatccaagtgtgaattgaggcaaaaaaaaaaagtaccacagatgtcttctaaatagtcttaaatagtaacagagtcattgcccactttctcattatagttaattaaatcagtgtacaactaagatttatgtggtccattgatttcaattttacttgtcataaatgttgctgcccatttgtggtagttttttagctctagtaaccagaagtaggaaggcacctgcctaccttgttattttctgaaaagataatatatgtccacagtgccagcaaatttgtattcataaacatcagcatataaggagctgttgtgtcaggaacactgaaaatgtggtaaatattaatttctagactgctgttttgtcaaggatttttggaatcagcatttcatgtatttttcttgcccttggagtcttctaaatgatagaagtaaaattctgcagtctttagcagggtgtatgtttttccacatggtgaaattctacctctgtttactgaaaagctgtgttctgccttttcactgcatagctctggtttgtttagatgtatggagcagggtatgtggtttttatttgattttatttttagaaattagcagtcactgtttttaaagcacaatgaacaggaaaatgatattctacataaaagacaataagtaacaatattttaataacattaacataagatccataagctcttaaaaatttattaacttggctgggtgcggtggctcatrcctgtaattccagcagtttgggaggctgaagcaggtggatcacctgagatcagcagatcgagaccaggctggccaacatggtgaaagcccatctctactaaaaatacaaaaattagccgggcatggtggtgggcacctgtaattccagctactcgggaggctgaagtagaagaatcgcttgaacctaggaggcagaggttgcagtgagctcagatcacaccattgcactccagctgggcgacaaaagcgaaacttcatctcaaaaaaaaaaaaaaaaaaaaaaagtttatgtggtttttaaaaaatgattgtttatatagtagagtcattgataggtgttttctatacactttttcttttttttggaataagccaccaaagaagctgtctaaattgactgatgactttccagtcacaaggccttcacttctcatacaagcccctctattggtcctggaaggaattgtgctatatttcaaatatctgtggatatttgaaaatgaagattgaaatgctcatggggagtggggttgaagccatcagcttgacagtgtgagtcctgagttttaatccttgatctatcatgcctaaccaggtatgtgacttggagtgtcatttaatcactctgagccacttggcatgagtcatttaacctctctgagcctcactttctccattgtaatgtagagataacaatacccacttcacatgtttgttgttaagattaccagaagcaacatatgagaatgctcagccatcagggttcagtcagtaattagctcttcttgcctaggagttaccttccagtcctagctttgtcattcatgtactgtatgatatttctatttattttttctctaaaaggatgacattacattgaatagcctcttgagtcaatatgagttctaaaagtcacaattctaatctccatatcaagaagggagagattagaagctgcttgtatggtctgtgctctgtctttgcctctctggccttcccggtgaagggagggaggaattgtgctacgtttataacatacaaatgaaccattttcagataatcagaaaaaaatagataattgmactaaaactaaattaaacatattgatctggaatgattcagaaagaaatttggagacatggttacaatgcttgccctgataaggtggtaggaagaaaaaaatacttagaatgagatcctttcctccctagtcactaactaagtaatggagaarcaatcagtttacataaagcttattgtctttatctttaaaatggaacaaagatttttaacttgttgtaagtattaagtgtggtacatgtagaaagtattgtattgaatgtgtgcaacatgttgtatgtatttaaggaatgttaattttcttttttattatcatgttaccttccctataaccggctttcatcatttccctgctgacaataccactcctacttgacaaaagccttcaaacaaagagccacacaaaagtttaggattccactcttgctgctgattagggttgcatgctgttggtaggagatcctgtggaggagagagaacctctggtataaagggcccttctaagtcctgaagtgcatgtgattcatcctaattgctaaatggctggtctgttaatcatgcactctgcttagtactctggtttgcagagcagaatagagaagcactcagagcagaatcatggtgatataaaagaggagcgctttcttggggggaagtgcaaggaattcaatattgctagaacataatgtgcaaggaaaggaagagcaggagatgagacttgagcagtaaacagtggccagatcattgaaggcctttgtaaatggtgagtcatcggaggattttaaactttagagtgatgtgrtcagattagcagcaggatcgttctgtcagcagtgtggaggatgaatggaaggaaggtgagactgtagatgcaagatgagcaagggccttgctgtagacatctacagagaaagaggcggccctgaactaagacagcagcacaagggaaaatgctgagttgtaaaatgttttaggtcttgaaattgaaatggtgactgcctggatataagtggtcaaagagcagtggcctacagggtgaccctcaagattttatcatggctcattaggtcagggctacctgtgcaatcacagatgtgcttgcttccatgaagctcttgctagtccaacttggtaggaagaagtcacttctgcaataatttcattgcayttttatctatataatttctaccttgaattataattatttgtgcacatagccataacccccgattgactttaagctcatcaagatgaagacgttgtttaatgcaaccctgagtcccaagcaagtggctggttaattgtcttaaataacatgtgcaatgatgagttaatgggtgcagcacaccaacatggcacatgtatacatatgtaacaaatctgcacgttgtgcacatgtaccctagaacttaaagtataataatatatatatatatatataacatgtgcaagttgtcatttcactagacaaaaatattgggcatatatttcatttcttcttcttggccacagattacattattttttataaagacattggtctcaggtatgtctcctttggaataccacttctgcccccgttggttgattcattaataactaatgtctgatttatttccttcttttaattggttaatttctctgaatctccaggtcatcttttccgagctcattggcaccctgaataaaaattttaaaatattgttctatctgggataaattaaagctgttgtctcctcctagttcttcacatacatctaggtccttgaaaaaggataatctagtaggatctgtttaacttgtaaaggtgctggctataggttaataccctcatttcttcaagatagctacaagtgattctatgatccttgttttgcaatacactctaatttgtaaaaagtaggtctacagtgatgattgaatatggggaaaggacagttcttgactgtgacacaggaagcctgggctctagatgtcattctaccacaggctatcggtgcaaccttgaaaaagtcactttaccttttgagtttcagtgccttatctgtgaaatcagagtgttacactagcactgcaaataaatatcccatgtatccaaatgctataagatatgttaaagtcaactggacaaatccagtgatttgtcaaggccctctttttttcattaaagtgtcaccagtcctatcagagcagggttggaaggaaggtaggtctaggaactaaaaatagaaagaaacagtaacaacaacataacctgacctaggtccagaggtttttgggaagcaggccaggggaacaggcaaagaatgaaatccaaaatgtatggccttagagagcaggtggtcatccaaacagtcagatggcatggaggatgggagagatagtggccacagtaggaaggccgtgaaaggcaacaaaagaacccaggagcatgtaatgctcagaagtcagaatcatggaagtctgtcagggattagcagggccctggccacctgcctgggttcataggcggggcagagattaaaaagggagaaatgggaggggtgggggaaacaaaagcgagacagacttccaggtttggggagcctgacatattaggcatgtctccaaaagagagattcaggcagagaagagcaagacagaaggtgagttatcagaactggggcaccaggtggggactgaggtgcggaagcccagttatgataactgggacaaaaggtcagggcttgaataataggttaatgatgaggcctaaagttttagaatttgggccactttaaggtttcttctaattcacagcttttaggaagcaatgatttctcctatctgtgagctgcccatctttgaaaactgactgacagtctccttttccctctctcaccttccacctcttctctttctctctgtccctgtcmatttcattgagggtttaccaagttcaaagtatgaatgaataaggaatgtactctggaaggatattgaaaaacagggaaattgataatcacaatacaacggaataaatgtggcagagaggtatgtgaaaaatacagagagaatggaggagcaagaattctgctccctccagaattgaaaaaggcaggccaagaggaattctttgaacagccttaaaaggaaggtaggttggatgtggtggctcatgcctgtaatcccagcactttgggaagccaaggtgagtggattcctttagcccaagagttcaaaaccagcctggccaatatggtgaaaccccatctctacaaacaaagtgaaataaaatacacaaaatacaaaaattaacatcgtatggtggtgtacacctgtacttgcaggtacttggcaggctgatgcaagaggaccatttgagcccaggaggtcaaggctgcagtgagccctgtttatgccactgcactccagcctggccaacagaaggagaccctgtctcaaacaaatgaacaaacaaacaaaaacaagaaaaacaacaacaaaaaaaggtcaggtattagtttgctgggtagataggcagggcaaggrcagacagagaagagagacctgtgtttgtgggtaggtatgaagttaaggaatgggcatattcaggtaatcaggggttaagtgtggtgacagctagggcagtagggggagttttcagagatcaatggacaaaataaatggggagttttcagacttcaggtagcactagagttgcttgtaaagaaaatgactcttggcagaaaagaagggaagatgggagtatagagtgaataacaaaactgtgaccaagaagggggctattgctcatgatcttggcaagagatggcagagatggaaccaaggttatggcgatagagatgagcagagacagttagatttaaggcaaagaagtaagggatcctcaaatatgtaactgaactaagttacaagcaattcacaggagacaagggcagacaactagaaaattgtgaattgagtttttatatatcaccttcttagtgaggccttcctgcgtacttgttcagtaacattcccaccacattcctagtccccttctttagctttttttcccccttagtactttctagtctctattatttcacatatttcattcatctttttattgtctgtctctttccactagaatgtacctctgaggggcaaagattttgtctttaagatcattgttttatcctttaatgccttgcactttgaacatttctggctttcaataggttagatattaaatatggaatgtatgaaatcaaagcaccagcagtcatggaccaaaacttataggaaggcaagacttccaatcatacaatattctacatgaaaggaattgtagacacaagactatgtctccttcatggtacggaagacagaagtgacttgcccaagacatagagcatgtcaggcagagataataggaagtaaagagtatgtgaatgtatggtgcttggtcttccaggggctcattgacattgaggaaaggaaataaggatggagatactaaggttggctgtggaaagaatactacagctgcaaggcagtccttgtattactaaattgaaaattgctaacataaaacagataaatattttgatctctttttgtaattgaaagataktgaaacaattgtttcttttttcctgcaaggactgttttcattcattttgtcctttgcctgtccctatttatgaattattctcccccctcttccttattacaagaataaagaggatattcatttcctttgaacctgggtgttacatatcaacattgtcccttttccctattataatagtgtttgtttccttccttcctttgtccctcaataaacatcaacagtcaataaacactaggctattggtctataaaaagtaagtgacattaggttatttttcctatctagaaatgttaaaatatcctaaaaggcatgaggatttggaaattatatgaaaagttagactattaccttgcattttactagtctgtttatttctacattctttccttccttcatttttctgttgttcaacacatatttcctttgcacatattaattatagctggttgagttgtttcaggtacaaaagtaaatcagggagtttacagcatggtgagaaagataggaaataagacaaacacaaaactttcaatcatcctgtacatagatatctagtatatattctacttatatttaaattactagacacgtatttacctaatagctactataggtgtaggcactgtgttaggcaatgtgggtccaataggaaataagacaaacagagtttccatccttccatactagttgagaaaacaaacatatgactgtggcacgtactgcaatgaaaaggtaggtgagggtgctaactttgtctagggattgaggaaagccttctcaaagaggtagtatttgagtcgagttttgaaggctgagtagaaatgaactaggtaggaaaaggtggagatgggaaggaggtgtctagacagaggaaacagcatgtataaaggccctaagacaaaaaaggacatgtcttattaaaagatgaatacatgagaagatgagagcagcaaggagaatgttagatgagagcggcataccaagatatatcatgtagaatactataggccagcaaggatagacatcaaggtttttgctcttcctcagagcagtgggaagtcaataaggcttataaacacggtaaagcaataatacaatttgaaatttggagactggattggagtatggcamaagtagatggagtgaaaaaagaaaggataagagtgatataaaaatattagataaaaatgcagaagagggattatcttctgttaaaaatgttggaaaaggatgaatggaagaggtggctttggacttggctttgaaaagaaggtaggattccagtatgcaggaataggaactgtgagttatcaaggttattttcaacagaagaccaatatttaggaggtcagggagatgtgaaagcaaaggtgatgtatgggaaacagcaagtcaataattctggctaaagtatgggacagacacccgaatcaaatgagtgagaaatagattgaagagtagaagttagagttgaagagtttggacatttaactatgtgaattttattgggtaagctagtaggcgtcattgaaggattttgagcccacaagtgcatgcttatagctgttttttttagggaggttaatcaggaaggaacatataacagtgatagaaaataatagaggttggagggaatgagaacagttggtagtctagcacaaaagatttggctggagccaatcatggcttgaatgagggtggtggcagtgggaatgtaaaggatacaaaagacatggagataaaataaacagtaatggcaattgattggctgtcagggaaactggggaccgtttaaagacttcacagcattgtcaatacttcattttatttggtctttggtacaaatctttgaggcagggtatgaatttggtgctctggaatacagagtgataaccacatgatatcttgcctacatgccatgaatagctttgtcactaccacagcagtttttgagtgactcccaaatggactgtattttaaatgttaacctactaacaattatctccatgttctattagcaatcaactgaaccatctgttcctactgatagaggatatcttctggaaatgaacttgagaatggtgaaatatcagatattaaaaaaaaacacagtctgagaacactttataccactccatcctctagccagagagagagagagagagaattggagtgggggaatggaattcttccttttctgttatataaagcttatgctattaatacaacatgtaagatacataatgaattctgagttaatttttttttttttttttttgagacggagtttcgctctgtcgcccaggctggagtgcagtggcacgaccttggctcactgcaagctccgcctcccggcttcacgccattctcctgcctcagcctcccgagtagctgagactacaggcgcccgccacctcactgggctaatttcttgtatttttagtagagacggggtttcaccgtgtgagccggggtggtctttatctcctgagctcgtggtccgcccgcctcggcctctcaaagtgctgggtaaaattacaggcgtgagccccgcacctggccgagttaatttttttttattgccaacctttttacattttttttttttgacatgaaggactaatcatgaaatgatgtgaatggaaaggcagtgccagtagtggaaaaagccctggatttgtaccacaaagagcaaaatttgaatttatctctgttatttatcagcaatataatctatgttgccacttaatatcaatcagccttaaatttcccatcaaacctagagacaaatcttgactccagatcttaaccattcaatgaccttgaacttgttctttaacaataactgccctcactgtggtagaggattgagagggataaataatatagatacattttattcctcttaaaatactagcctactggttaggctaacataatgcctcttagttattctgcctacataaagcttttctttcattattccttctttcctacagtttcaaaatttctcttgatggaaaacattttcaggtatttaatttttgattaagccattggattagagagaggcatggcttatctgaaaactccaatgaactgagaaaaaacaaggctgcatttcatttttgacattaaaaacataattttcaaaatgtataggttactccttagaaaagtacaatttatgttcttgaaattcatatcagtttctatactttatggaagttcatctgcttcaaacatgtcaaacgtgcaaataaaatatgctaaaaagtgacgtgaaaccctgtctctactaaaaatacaattagcctggtgtggtggcaggcgcctgtagtcccagctactcgggaggctgaggcaagagaatggcatgaagccaggaggcggagctttcggtgagccaagatgacatcgctgctaaaaagatgactcagttctcttcaaaagtgtatctgtagctagagtgtagtaaagttatttagggtcaccacccagaataactcttttgctgggtccagtgtacttttgtcttctgccagaagtgagctccatagatatttacattgagtactaaaatattaattaaatgtactaaagaaatcctcartgaagctgctttgacaatagggccaaaggagagttatttatttaatgggtatttatagagtgcctaccacgttaggcactctgctaacccctgggcaaacagaagtaagcaatatagaaacagcccttgtccgcattgaagagacagtccaggggttgggggtggaggaaagacattaaacaaatgattacaaaaataagtataataagttgtgaaaagtgtataataatacttttccatgcaggaaaagtacagggggttttgagggcatgtggtaagagagtctgcaaggttctgcccttgaagaacttacagtcttctttaatatactatgcatcttctatgggggaagctggtctatgcaggtctttgcagttttacctgataaataacttgcctgctgtctgacactaggaaagctgtttaatctctccagagttcagttttctcaaccataaaatgaaacagaaatactaacccgatagggctattatgaagattaaatgaaggaatcaaccatgtgtttgatacatgttatgtgctcaatgaatgttaactatgttggcagaaagggggaggaggaggaggaggaggaagttggtgatggtgatgatgacgatgatgctgctgatgttattgcagtagacagggtagagggaaagttagtaattcagaatgagaattctatagtcttgatactcagactaatatctgttatttagaaaaaaatacacaactataatcaaaatattagggaaaaatccttaaacatacaaaaaaagcaatgtctaaatctgctgtctagtctgtatttttttttactgtgtgctaatggaaaccaataatttgaacaagaaagggaaagggtgaggtatcatttgagaaaaggaaacttagtttccaattctggtctgcacttttggtgataaagcaattgtgatatttaagcgtttggataactgtcaataaagaatttggtaaggagggttttcctgttagagtgggcataggagcctaagaagacgtgttggagagacaaacaaattagcattgaagccctaaaatgagcaggaaattgacaaagtgaaaagagaactagatttgagccagcagtctttacttccagtcttaggtttacttcaccagtgagctatatggtctagttaatcttaatgcacctctgtttcttcttttgtaagacaggaatgacacctaacttatttagccgataaataacatgtttactttatgaaatatgcctactttgggtagatgtaatatatcaagggatagttaatactgaatgagaatatacatatgaatgctcttttgaaattataaagcactagacaaacctaaaattattggtcataatcttactctcctaactgggggcttatatttttacatttaaatttcctgccttcccaagccatttataagctccttgagtgtgggaaagatgccgtatttgttttagtgtccccccagtaggtaaacacagcagaattttcaaacatgtattaactgagctgttgaggatctaccatagttgaagaaatcagacttgccttcacaggcaaggaacaaaatatttctagcagtcgatatattgacaaacaggttaggtagcatcagtagacatacgtacagccaaacgtagtgggccagacgtgctgaacaaaggttttgggtttatcgatcagacccaaattcaagcataggcaagccccttggatttttgtagaaccaaaaaacaaacaaacaaaaatagtccaatgtcttatgttcatggagcaaacttttaatgagtgtcaaaatgctatcatgggtcaggcacagtggctcacacctgtaatcccaatactttgggaggctgagatgggtggataacccgaggtaaggggtttgagactagcctggccaacccagtgaaaccccatctctactaaaaaatacaaaaattagccagatgtggtggtagtcccagctactcgtgaggctgaggcaggataatcgcttgaactcaggaggcagaggttgcagtgagccaagatcacaccactgcactccagcctgggtgacagagcgagactctttctcacataaataaatgaataaataaatattttttagtgccatcatggctcctatcctgtaggagtccaccatttagtggaggaggagagaaacaagcatataatgcaatttgagacactgtgaatgaaagtgtctacaaagggctatgagattaaaaaggagacccctgaagaggccagagatagcttctcaggagggttaaaggtgacatatagaagaaggaacactagcagggtagtgaagaggatacagagggaaaggcattcccggcattttcagtccctatttttgtatgatgatctgtcttaagaagtttctgatatttgtttagactaagagatgtgtgtacctcatgaaagacacaattaagataattaattgttaatgattccttcattttttgaacaccaaccctaaaattttcttatatatactatgcatactaaaaagtgaaaatataaagctataactgagaaagtgtcatagagttctgaaaatgaattcacagtcgaagcccaaatagaaaattaaaatctgctctttaagctgctcctttactgagagtgttttgagtccacagtaattccgggtatagaatacatcttgtgcttcataaattgggctgagccagaatactgcaactgatgttacaacacagatcatatgatagtttattttacacagtaagaattgtgtaaacccatcaccaactctttttttcactgaatggtttattttgtttcacactggagtgtgtggtttattttggtttatttacctttgctgtccatctaaaatacttggggatatcacctacactactggattgtttaacaccttcttaacatgaacagaggttttaataaggaaatgaatattgcaaatgcatttattgcaaatcctatattaaggctgagatgtgggtcttaaaaaatactcattcttataaggtacccagttttcagggtacaagtggatgaagaacagtagtcctttctgccttcctggtcaccattaattttgatgattacttccaaaaccttagataccagtatgagctctactttattctttatagtactactaatatcgtcttctctttctcctgtttcttgacaattttgctttctggtttcctccttgttcttgcactacctctgatgctgtccacacactccctttttaagagctttcagacataacacttggccagcactccctctgcaggtgatctgatgaatccattacagtcatcttgtcacaatcatatttgtttttcgaatattgttatatgttgccaaagcgctgtatatcaactkgttaaaagaattgtagcaaaagtacaaggaagcctttcagawctaagctgctttaaataacagtatcacttagattcccacagtccaatctgtccttagacagaatccactattataaaaataaagcattatgaagaaagagttcatgtataattgatttttgcatcaaaacaaattatggttcatgtgttcctgatgaaaatattgttaatttccacagactgacaaaagccttttctcctaaactagaccagtagttattacaacttacacaatctaggaataagcttgaatccttaaaagtagagaagaaactggaaatgtcagcatgacattagtggcttttatgaatgtactttctcatggttaaaaagcagtatgtgaggtgatgcaagctaactgtggtaacacaacaaacatcagtgacagtgcaataaagacttatagctctcacgtcaatgttcaactgagttggcgatagggctgttgaccacatagtcatgcagaaacctctgctccttccatttttgtcactaccactttcatcarttgacttctaagattgccaaaaaatagagagagagcatggagaattgcacaagtggtttcatgaggaggcctggacatggcccgcgtcatctctactggcattccattggccggaacgcaatgaatggtgccaaaataactgcaaacaaggctaagagaattcatcatctgtgggtccaggaagacaataaaacaatttggtgagcacatagcattgtctcagatagaagtttataatttagaatgaagtgataattgtattagtcagtataattcccatttcctttttctgatttttaaaaaatttctcccttaagaagtttaaagagaggcagagtgtataatacttggaagcaagggctttgtagtcgtatcagtcttagttcaaatttccctttactcttgctagccatttatcctccttgaggtctttttcctgttttccttatctttaaattttttcattcattcgttaagaatcaaggtacttaacaggaaagacactgtaatgatagaagtgagataatgcatactgcatagggagtattcaataaatgataactattattattttatgaataaatacaggataaaggacattcatgcacgtgacatttactattaaaccttttccacccccttaaatttaggacctttgggtcccaaaccttaagctattctcagaaaagatgttgcaccrtcacaaaataaaagagttgaatgagaagaggaatatctctggttgtgggaatcaaaagaactttacagattttccattttgtgggggtgagggttgttagctgcccagtccactggaatgcgatgcctattttcccaatggtattaaggatgactcacaagaaagcttgttttcaccaagtctctcatctcatctgcaccaggaaagaggcctagttgtacctcttaggcaggagagcttagtgaagtttttctgtccctaatttctgtgaagtgtgctttctctttgacgtatgcacataaatcacagacacttgcaaaacatctaaaagattgaggcttgagcttgaatgaatttgtcacaattgagtagaagggttctcattcagtgcccatgcacgaaacaaaagaaaattatgttgtgctgtctggtacatgatgtttcttatggaaaaacaaaaacaaaaacaattgcaccatatatttttttttaaagtatcttttatgaaaacttcctctgaagatatggttaaggacttttgctggtaacgtctctcatttttgcaatgaaaattaactataaaactatgtagcccgtataaacctagtacagtactttgaatatatagagtagcttcaaagtccttcctggaaactcttcatttagctgagatttgatttatgggaaaagtggagctataagtaaaggatttttttaaattttaaattacaaatgggaaaagcaataagtaaataagttctaacatcacatagtagaatgtcagtggcctaaaagaacastcaaaactcctaatttccaggtcaaaatctaagagcaggctaccttttattagacttcttattgtttgatgcctcgtaatgtttctataaacataataggggaaaatatgtgaaagattagtttagcccattgcccttgggcagctgaattattaaacctttcaaaacaaggacttctgtttctgacaaatagtggactatgtttcttggaccaaccatccctttgactacaactacaaatgttggatacaatatatttttaaacgaacaaaacttttatttatttatttgaaattgacaacattgtatgcttttatcatgtacaacatggtattttgaggtacatatacactgcggaatgattaaatctagttaactaaaaaattaattccttcaaagtaccagacaactaacaagatagttaagcattgtcaggcagaaacctctagcctgggcaacatggcaaaaccctgcctttagaaaacatacaaaaattagaaaggtgtggtggtgtgcatctgtagtcccagctactcaagaggctggaggtgggaggattgtttaagctttggaagtcaagactgcagtgagccgagatcacaacactgcactccagcctgggtgacagaatgagaccctgtctccaaaaaggaaaaaagcaaaagaagaaagaaacctaagtgaagacaggattccagagggttggtgtcgcactaaggccccttctgccctgacagcatttgcaaccaaatgaatttaagctttgaaatcaacccacaaagacttcatattggaattgtgggatatggattataaaatacttattgtttaaaataattaaagacgaacttgaataaacagtacaggaaattgtaaaaaccgcccagctgacttgaaaaaaaaataaagagaactttaataaaataaacaaattgaaattaaaaacaagttgagaagtgtaacagcaaattagtcaaagctgaagaaacaatgaatcaactagtccagaaaatttatccagaattcacagaggcaaaaagatgggaaatatgagaagtgagaggacattgagctaggtgaggactggtgagtatccaacaggcattacagaaggaggggayaaacagcatgtggcagaggcaacatttgaaaagagaagggctaggtgctgtgactcacgcctgtaatctcagcactttgggaggccaaagtggatggatcacgaggtcaggagtttgagaccagcctaaccaactgggtgaaaccccatctctactgaaaatacaaaaattagctgggcgtgctggtgcacacctgtaatcccagctacttaggaggctgaggcaggagaatcgcttgaacccaggaggcagaggtagctgagatcacgccattgcactccagcctgggtgacagagcaagactccatctcaataaaataaaaaaaagaaaaagtaagtaggcaagaggtttctagaattgataaaatgcgcaaatacagagattcaaggagaaacaagaattgtaaacagatttttttaaaagtctgcacccagacatagcatggtgaaaatgagaaagagccatcttaatagaagagtggtaaggtggctgagagggagggatgcagagagggcagtgtatatctcaatatatattgagaaaataactgtcatgctataacttttgtctttaaaaatgaaggctaaataaagatattttcagggraaaaaaaaaaaactgaaagactttggcaccagcagaacttctctaaagaatgttctaaaaaaatgccccataggcagaaggaaagtgatcctagagtgccatgtatctgaattaatctaaatgaacatatattttataaaagaaaaacattgctttgtgtggttaaaaaattgagaccaggtgcagtggctcatgcctataatcccagcactttgggaggctgaggcgggtggatcgcttgagatcaggagttcgagaccagcctggccaacatagtgaaaccctgtctctactaaaaatagctgggcgtgttgatgcatgcctgtaatcacagctactcgggaggctgaggcaggagaattgcttgaacccaggaggtggaggttgcagttagccaagatcacgcctctgcactccagcctgagtgacaaagtgagactctgtctaaacaaacaacaaaaaaaattgaacagagtaaaaatatgatgacaataatgtattaatgatgtgtatacattaataagaagtaggagagtaaaattgactaagtttagaatttgataagtaaacgttataatttcaagggtgaccacttttaaaaagggaaacaaaaataaactatataattttaaaaagtcatctaaaagaaagaaaaaaataaacacaaaacagtttgggcaaattaagagcaaaaataaggtagctagaaagccaaatatgtagcttcytgtattaaacattattgaaactactgctacacaaaactagatagctgmatctcacaatgtaatggtaagagaaataggcaagtcacattttgtgtgattctgtttctatatagttcaaaataggtaaactgtactatattgtcaaagaatgaaggatggcaaaatctataaagaaaarcaagaacataactattacaaaagttagagtagtgcttagcygtagacagacagaaaggatttagagtgatacttcataactactttttaaactgcacatattttatatactcttctatatatgttttatatacatatatcttctaataagaatgtttccaaaagataagtttatatataaataaatgataccatatgcatctttgctatacaartttttcttcatgttttgtgttatttctttaaagtaaatgctcagaatggagatcaatggtgaaagatatttatatatttagcctccttaactacagtgattcaaaggcgatcccgtctgatttctaggccattttcttagtgaatacacattatagctcacacgttattaagttatttaccaaaaatttaatgtcaccttatgccaccagaaatgcatgagtaccaatgtctttttatttgcatccatactttttttaaaatgttcattttgaagcaaatttaataggcaattctattatatattttcaactatatttatgctatgttaaaaaagtttatcattacaaagaagcccagccgaagggtgaagaacatggctcctgaacccaaactgcccaaattagaatcctagctctgtctatagtaactaagtttagaatttgataagtaaacgttataatttcaaaggtgtaactacaaaaacttggacaagatgttttacctaagatattttacctgtctctattttcttctctgtaaaatgagaacaataatagaatctacccaatggagttgttgcaagaattacatgtaaactgccaaaaacaacgtctgatacatagtaagtgttcaatacatgcttgcaaatactttattattacaagaatagaccaaaatggatttgacctcagtgaaaatcacattccttgaacatcgtaagtatgatcagtaaaatataatatggccaacctacaagacaaatactaacctacacctctaagaccattggcatatgaatgtcatggatgtcatttttgctttgaggggttctagtatttaatgctgaccttgtgaatagagtatgaatcaaagagagggatggagaatgtttgcaatcatcagtttaattcaaaactgaaatattgcactacgtctctggctttgtagtaggcatttagaacatagtagtgtgcgaggctctgcacgctagcggggaaaacaaaaagcgaacaactaagtattggaagaagaagtacaggggcacaatgggagcaaaagaacaggagatccaggtctcatttaaggtgtaaaggaaagcttccctggaaaaagtcatatttagcacttactagtgtacaaatctgtgacagatacattgtgtcataattgattcttcacaaagactccattaggtagataccaaatccctattgtatagataagaaagctgagattcagagaggatgactggataagtgaagctgtttcttcatttccagtgacccactcagattcccatggaatggaaaactaacgctggtggcacttatggttctctttgtacccccttagctggcaaaatttaaaatccactgtgagccaaattctagcatactaaactgcaaacagctgctttggcttttttttttttttaacattaacagaaaatccyaagctaaatttaaatttggtttttaggaagaaacaattcgagggaaaataatcagcatctagttttgtttgctttccattaagaagtctcggaatacaatcagctgtagtgatactattaaatgctcaggaagtattcagacaaattcacatctctactagcatgccacccttgtcttgtcttggagttcattaactttcagttatgcttgaattcattgttcattaggttatggtaaaatatcgattgtttgatacttaatattgaaatgtaatataaagactggttgttggaaagatgaaatatcaaaaccatttgtttgggttgggttattggtaaaaatagaactaagctgtctcaaaggatggtctacctcatccaacctcttccccaaatgagtaaacattgtcattggtttcttatgtatcctttcagacattctttatcatccaatcaaatatttcatattttttatataaaggataacgtacatacttgtctgcattttaattttttgtcacttaataatatatcgtcaagatcttcccatatcagcacttgtttttagagctttccctgtatgaatgtagcataacttattaagtagtttcctactgatgagtatttgggtttctaataatgtcctcttacaactaaacctagtgacattaacattcactgaatataggtgtatccctcaactttcaaccttgtgtgtaggtaggatggggacacgtgtctcagttaatcaatgagataggaagagaattagcataagcagtttcaggcctgactcttaaaactgttgtctgcaactctccaacattctctccacctgccagaccccttagaaatcacctttcagatggtatcattacaagaggaaggagcgctgctgccctgctgccgcaccagcatctgacttctatgagtgacagataaactgtccacatggtaagccgctgagattttatggttaccatggtatcacctattgttttctgactaatacaaacccactacttcatatgtgcacaaatgtatttatgaaataaattccccacagtggaattttagctttaacttctctttctcacagcctctaagaccaggtgatcaccagactctataatttatccaagtgctccccctttgggcccaggcttcacattccatagatgctgctcaggtttaggtcattcctgtttaccacctgcggtctccttgccattcgaaactcatacagtttttcctgacctctcccctacaaaccctttaaaggttgccaacagtttacaggattaactctagatttttctaacctggcattcaagcctaaccacactaacatataaaagaagatagtacagtaaagtgtctggcatggagtcggtactcaacaaatggtggtagtcattacattttatagccccttcctacaacaaaatagtgccttttgtgcagttgacatttaataaataattaccagtggactctattatcaggggaactcataattcactaagttatgttaccgtagtattccttgatatttttgtttcacagcttagttttaaggtttaatcttcttagagtgttgattaattagagaattggatgtaaaggctgtagaaaagtagctcataaaatttttggtaaaacatttagggaagcattcctttgtaactgggatggattatgcaatagtacatatggcatccaaagatgattataccacttaaggcaatattaaaaacagtgtatcaaactgaatattcatattgaacatatatacctaaatgatactgctaagtcataatcaagttggaataactgttgttagcatttttgaaccatcacattccaagagataattatttgcatattgttacctcatgaatttgaagtaagcccatagataatctgaagtgtttaaaaatgttcatgagttgagtttgatgttcctgccagagctagctgcatttcttactgtaggaattatgaaatagaattttatttctgttgacaaaggctagatgcttaccagttcaaaagagacaaatattaatataatcttggttatgtttcacattgatttaattgatttaaataaaaaagtgtgaaattattctggaggataaatccagttgtcttggaaactttgaagcaataaaatgaaaacaagatattgtcatgcttcaaatgcaaaggctatgaatataaatcaactctaaatttatttcaattttattccagtgtaaacaaaattattgttaaggcccaaaaagaaaattaagcatacaattaatacaaaacaatatataccatgtaatatatttttatttatattacaggtacaaaaatatctgaattcagcattttggtattgacttgggacaggtttttatggagttttaactgaagaacagaagtttaaaaacatcagagtcctcccctcttcccttgatcactagtaatttcacatttatatgtactttacaaggctgtgcaaagtacccaagtctggaaatctcatttactctggttacaaactttaagtaatacaacaacataataaatacaatgaaataccctttatattggactttgctgaggaaacctcagaaatgttagcgagttcttttcaaattaatcctcctagcaacattagctgtagagattagctatagatatggtgctctctaatactttgcagaaaataaaatgcagggagttgacataaaggcttttagaagcaacaacccagtctatatgaaagcctgcaaattaaagtatatcctttagtggaggaaagcaaactcaatctctaagctaaatattcagggagaaaactggatactctgagagtctcagagtgacatccaagaatttcaatgtagtcagtgaacaaaggaatacaaatttaagcagagcaagagttacatgattttttatgattataaataattatttctttagtagcagagataaatggcttctgcatgtttctacttccaattcctgacatccactttttcttctttattctcttcttcctcgtttccttttttatcacatttatcacatgctcctctcttttgaggttttctcccatttgctgcttcatctcgtagccagagatgggcttctctaaaacatgacatttctagaaacacagggtactgaaataattgtaatctaaaatgtttaaatttgtgaaatttgaataaattaggaatctataaattaaaatgaaatagctgccctcttttctactacccaattccagaaaacagcccatccagcccacctcattacatcatcacaaaacatacacaataaaaaatggcaaaccaaagactagtgggaggttcttgttattagaccacccttttaattttccccctgtaggcaatttggaaaattattagagatggaatagatgtgggtttttttttgatagattctttgagattgacaatatgaaagatttagtttagatcacgcaataggatctgtagcctcttggtaattaatgacacggccatccgccctctacttatggtacttccctccagtaataacttctctgctgttattattggaattctgtgtatctgtaggataagtcgaatatatgtttgtcagtgaggctgtttgttattatacgtccccagtgtatggttgcacctataatggtgcagtgtagaacaacaagaagatagaaaactgatagaaaagggggagcattaactctaagaaacacatgagacatttttgctggaagaaatcatctccacactaaagttttccctccctacaattggctttggagagtatgtgcatggtctttgacaaggcaacaaggttccagtcatagatattagccagcccttctcataacattgrcacttcatcagaatgtagaagtagaaaaatctgaagaactgtttttgtagctttatttactttcaggtaatccatatcccgtggtcttctgagtaaacctgaaaagatacttgaagtatacgtaaggcaaagggatattatagatataaagccataatataacatacaaattatgttgataaagttagattgataaatgtaactctaacatttgatctttgtggcatttgggtactgtacacttcttggaacaggagtattgtctctcatttagcttttgcatgcccaaccacacctagcaaaaggcctactattgagcagttatgtttagacatgtttctatattaaagatgcctcaggggctaggcaacaaagctgaacactgaccatagttggctatttatttttttgtgaggagattgtaatatttttctgtataactaatttcttaataattataatgattataattataaattctatataaccaatttcttaaaaattttatacttttgggtacaaatgagaactattccaggagagaggtaatttatgtacaactttaatgtaacctaataaaaagggtgacatccatcacctttgctgtattatattatttagatgtcaatcaccacttcaactcaaggggaaggtactaggtaaatgcatggactctagcgcccacctgggagctactggaagcctggggacgctgccccagtgtggtgatgggggatgacctgggactcaactgcttccaccacttcttactcagaagagcaaggaagaggtggtggggagttccaaaacgacatgagtacaaatggcctggagagtaatcaatttaaataaaagaggttcagaatcttctaaaggaagcttacaaaagcagtgacttcacagaataaatgatataatcaagagtctgtaaataactaaaaatatgacaataaaggcaataaaggcaaatagcgtaggaaaaactctaggaaggctggtgaagtactatatttttcaggcctacaaagcaaactatgcaagacgatacaaatataaaacaaattttgatgcattttaaaatgcatggtttgtgaaggaaaaaaatctatttgacctcgatgtgagaaacattctctcatgagtgatccaaggttcgtgacattggatttgcaaagaaaaaaatgcatcaacatattrcctgacctggcactaacagtatttacaaaacaattataatatgatggccatttattgattttcaacttttagcaatattgtgtaacaaaatgtagaaaatattgttatggttgtatgacaaaatataaatatcaacaatcttaaaattatagaagtaaatatttagctgacagaagaggggatgtggaaggaagaatgatgactaatattgacattttacagattgtggagttgaggaagactgtcaaatattgaaataagagagagatttttaagaaattagttacagagttaacaggactcaaataatattataaatatcaaacataccaaaaggatatagtaggagagtagtgtgagtaactaaatcttcatttttcatgtatagaaatcaatagatactaaagttgacaaataaaaaattagaggtatactcatataagggtaaagagacaccctaaaaaataaagtaaggacaattcccagaggagtgttaagagttaaaaaaattggctgggctgggagagtctaagcttttctagacagcttgcatggaaatacaaatacatatattcacatgcattactttaaaagtaataaaaatagatgtaaaaaatccctaaattggttaaagaaacgtgctattctgagtccttcgcttattacctcttgtgatttgtctcctccacagttaactccttaggggtacgcattggttacctttgaggtaacttacagaattaaaatgttattcagtagtaacaaataactgtgtcttgattgattgagcttctatagcaatttcccttctaaataggaaacacaaaattatgcgtgcatacaggtctctttattgttcatttaagatttatcgagcaattactatttgcaagtcttaattgtaggctcccattggactcaaggtatatacaatcttttcagtttaataagtaggcaggttaggttgattatttgatcagtatcactcaaatgtctattatgagctaggcactattccnggccctggagatacaatgtttactacaacagggtcctggttctctagaattggaatctactattaataattccccaaaggaggcaccaccttatgcatactatttatttggctgattatgatgtgacagtactctaaatatctgtggaaagaaaaataaccttgtagtatgtttcaattcaaatactatcaaagagatcatgagctctggagaaaactacatttcagaggaagatgaatgagtttaatggaagtatgttacatattagaaatctctaaagcctgaggtcaaagcatgagaacaagttctttaccctgttcatagaactgaaataatattcatttggggctgtgacttgtagcaatgtatggaaataaagacaagagtatgcctctttgattttttttraaactctttaaagagattaaaaaaattttactgctttagatgatttagagatctaaatgggagtgttagattcgcgaatttgtaccagtttaagtgtggaagggtaaatgttacagaaatgattggagaagtcagtgatcaggttgagctgtgataattttgaggtcagaggcaaattgggagttatgccaacaaagagtttttctttaaatacacatgattttatatcttgtcatctcctttttcaagagcctccaaatatacatctcagtttctccatccaacccctgcacctggcacatggaaacagatggaagaattcaaaatctcagttaaagttgcctttgaatgtatcatgaactcctgttgtgaagtcttgtgaattagaaacacagtaccaacactctgccaccttgtggcttctggagtcattgcagcacatatagaggaaaatcagcacccagttccagttttactggaacaacatgtcttaggttttttgggcagatactttatttaaaggaatatgtagggttcgtgagaatgcatttcggagttatctttctaatatatatatatttaatatagttatcatgtcattggctataattcattagcctgccacaaaataatgttttccaaattgcagttttaaggatcatgaaatctttgaactaaaagggacctcaaaggttacgcagttcagtatttgaattccttttattatcattctaataggagggactgaagtgtgagcttaaacatctctagggcagcttaattttgcaaagcttactatcccaactatcttcgacaacatttatttgaagatttatacatttaactaatgttgcttggataaagctcaaatttttccatatgaaccatgagaaattatgtaagagtcttttaaagttgcattttccatatttattagttcagcaccaagtatataataggccctcattaaataatagccctgtttggttttcctatatttaaatttttaagatgtaggcttatagattattaacgttgaaatagctctatgttcaatgataaaatgctttcaataaatacacttccagctttccacatttacttttgttctttttaaaaattattttctcattgcaaaaaaaaaaaaagcgtcatcgagagcttcctatactagatgctagaaaaaaagacacagtaactgctcttgaaattttttatctgttgggaaacaatttatttgagtataaaagtttcagctgcttgatggaggtatgtgaaaagtgcagtaggagcccaatgaaaagcatcttgggctgttaatgcattcattttctatgctgcgtaacacatttccacgaacagtcccttgaaacaaaccatgtttattatttcacagtttcctttggtcaagcccaagcacagcatagcaggactctctgcttcattgtctcactggctggaatccagggctgcagtcttacaagaggctaagccaaggacagatctaattccagcttacttggattgttaacagaatgtatttccttgtgggggtatggctgagagcctcagcttcttattggctgttggctggaagatgccttagctactagagtctgcccacagtaccctgccatgcagccctctccataggcagttcacaacatggctgttgcttctttaaggccaacatgagagtctctctccaatcttctaagaagtgtgtcttatataatgtaaggtaatcatgggcatgatatcccatcttttttgccatttaatgtaacctaataaagagggtgacatcccatcacctttgctatattatattatttagatgccaatcaccacttcaactcaaggagaaggtactaggtaaatgcatggacagcagggaacagagaaataaatattaggcgtcatcttagcttggggtgtgtcagagctgaagaaaacctaaccatataatccagaaaatcttctcgggggaatggacgccgtgctaacacatgatatttatgagtagataataggaaaatgaaccatgctaagacaacagctttgctgaaatgtagacaagtgaaagagtattgagaaggtaagtcggggtcagatcacmaagggccytcttttgtgaattaaggagtatgccaaaagccaagggaaaaatggatgaataccaggcaggaagcaccatggtcagagtttcatggtacaaatgctattctggcagcaatgtggaggacagatggaaggaggttaagatgagaggaagggaaataaatgagatgctatctatagtcctagagtcatatggaagactgaattcaagcagtagagtagcatctggatatgggaacttttttttttttgtgacggagtctcgctctgtcgcctagactggagaggaggtgcaactaatatggtatcaattatatagcattagtggtaggagagagattgagtattttttgtgtatttaaagccagtagacttctttcaggtgatatatgagttttaatttttaatgatgccataactaaagagcactgagatttctgtaaatgtgctaaattccttatagaaagccaaattggtatttaaggacaaatggttatgataaaacaaaacttctgagacaaatactctcatctacagcctggcataggcttgcaatggataactgatcactaccttgaatgagtagacaaaggccaggagccccaacatattttatcatttaacgtctcattcgacaggagcctcttgattgttttctacttcagtccaattttaaaatgatagtataatcttgggtaatttttttcatcagcaataagtaaagattttatgctggaataagactggggaggtagttggaaaggtgttcccattagcagaaactggcctgatacctatttgatcatctgtacaaagaaggtactagtttgatgacagctgtctggtggttttacctatttctctaaacactgagaaaaaaaaactggtttgaggagaaagaactggcaccactgtagacattaatccagtgacgaagaactagattagggagggttaaactgatttctagcaggaaagctgatttgtgggagcttgtttatttccttccatgtcaggactgcttctagccaaacatgttagggtggatatttattgtctttctgtctgcccaacattcatttttcttttcctcattgtactccattttcctcttgggaatcacctgtctcccactgatggtaattttgatatgactgtaaatccagacaggtgtccccatgctccrgaagctgaaggaatcccagaggctgaaacctatgccttcaggcagatgcttcccccttacaggaggcagatagacaatctaagttcagttggaatttaatcattctagcagcagctgctttttccatatctggttattttatctaaagctttcccacattccttctgataaagactctttctgatttagttaatcagagttcgttgtttataaccacagaaaatgatacactggttcattagcattttaggagggaggaggaaatagtttattgaacttctatcagctgtcattcagttagatgttttacatattttatcactactaaattgaaacaaagtataaatttgtcttcatattaatgaactgaattattaatacattttctaatattaaacccagtttacattctgaaataaagtcaacttgcttgtgatgaatttatattataaaatgaagaacatgtatatagctagatttagtatggtaaaatttagtaagtgtttttgcatctatgagtacaatgagattgcctaattttagtattgacattatactattctgaaattgaactggtgagtgtacctcttttcctcattctacagaaatgtttaagtgtgaaatttttcacctcttggttaaatggaagaacttgtctgtaaaactatctgggtctagtatttccttgtaagaatattttaaaactttttattcactgttttaatatttatatgattattcaggttttctctttattcttgagcaaagtttaataagttatgattgtcaggaaatttgtcattttttttaattttcaaatttggtagagaaaagctttgtaaagtattatcttattatcgtttcaaattttctgttacctatcttgatatgtctcccttttcattcctaatattatttttacattccccaattccttcctttcgcataactttaagggacactgttaacaatgtattattctatatgaatcagattccatggatcacagtccattaatatattcataaatacaccatttatgtagcatatgatatgaaatgtagctcttggaattatgcaaaatgatgttcctggtactcttctttttcttgagagatctttccagaatttttaaaattttatttgttatgaaaacactaaattgggccttgctgattttctctattgtatttattttctacttttgaaatatttgttctgttttttacagtcttcttcccaactttcttttatttttttccccctaacatcttactttggagactttgcttattggttttcatactttttcttccttttctaatgtaaatacttaaggctataagttttcttctttcaatcattttagcagcattccacatatkgtaatattcagtattattgctgtttagttttcttctttaactcctgtgttatttagaaatggacttttaaaatttaaaaatatatatgttttcaaagctatttctttattcctgatttctcattattttgtggtcaacaacattgtttctatggcatagactctttgacatttgttgaggcttgaactatggcctagtatagggtaaatttttgtaaatgttccatgtatatttgaaaagaaagtgcattctctagctgattagtagggatttatgtcaattagatcaagactcccacttatgctactcagaattgtactttctgtttcttctagtatctccaacctttcctcttttattacttacaggtttccatgagcatctattttgaaatttcagtaatggtcataaaatgtgcattgtttgtccaaaaatgtttttattttattctttttttctgaagaaatacttattttttcatggcaacaaaattctagttttgtttttttggtgttccttgaaaatgtaactctactctcttatagattccatcttactccatatttagttgtgttactttargtaatctacctttccttttgggttgattttaaagtctgttctgtatgtttggtgttctgcagctttactatagtaagtctavgtttgatttcttatgataaatgctgttggggcttattgtgctacctaaatcaatggacttgtatatttaagttatagaaaattcttagcaaacttgtttttttttttagtaatacctcttttcctattttccattactgaaactctcattaaaagtgtactggcaagatactttcaataatgttacggtttatactcagatgaagagggaaatagtgcctgagcctcagaccgtattgtccttgtctctgtgtgcatttgtttaataataccatttcttttctaattatctcaaaagtatttttttgagctacctatgtttctacatcttgaatcactttgttccatcctccacttttcttaacttcatctcatttctcatcttcttatcctctgtggtgtcttccagagaaatttcctgagatctagttttcactccctggtgctctattcaggtgtgtctaacctgctgtttaattccttaaaggctattttcaatagctacttttttttaatttctggaaattttatttggttctttgttcacatcagctctctgtttttagtagtcttttgtccttaattatgcctttcattttctcctttacgtcttgaacatattagaacatattgtatattatttatcctacactttgaattgtttgagctttttactttgttattttcttttgctgattctcaatcatgatgattcactttcttgaaaattttgtggctggatttattgtttccccatttatttagagtttatgtcttctgggtatttatctatgggaattctttgagacttgggttgaaggtgagtttcaaaagaaataatgtgtatttgtttcttccagacacctggggacaactttacactctttttttttttgttattgtttgtttatgtttgtttttgtttttgtttttgagatgtttttgagatggagtcttcctctgttgccaggctggagtgaagtggcgcgatcttggttcactgcaacttccgtctcccgggttcaaacgattttttcttcctcagcctcctgagtatctgtgaataccagtgtgcgccaccacgcccaactaattttttttttttgtattttttgtatttttagtacagacagggtttcaccatgttgggcaggatggacttgatctcttgacctcgtaatccgcccacctcagccacccaaactgctgagattacaggtgtgagccaccgcgcctggcctgaactcttatattggtggtttttagaacacacagtgtgaatttgagttccaaatcttaaaaaagggccaagttgtgattacaaattctcaggcgagatttttccccccattgagtgtcagacccaagattgataaatatcctcatcatcttttttctggttatattagtctgctcaggctgctatgactaaatattacagactgaatggcttaaataatagaaatttattttctcacaattctggagaatgggaaattcaagatcaaggtgccagcaaattaggttgctggtgaggaaccttttcttggcttgtatatggctgccttctcactgtgtcctcatatgacctttccttgatgtgtgtatgcagtgcatccagagaaggaaagacagagagcaagagaaagagcaaaccagccccctgatgtctcttcttttagggacactaatcctaataaatcacagccctacccttatgacctcatttaatcctaattactttcttaggggccccatctccaaatacagccacagtcagtgttacggcttcaatatatgaatttggaggcagaagaacataaacattcagtctatagccagtggaataggtattttcctagtaggccctttcagtgatagaatgaggatttgggctttcagctctctgtaggaatctttattctgactcttcaacttgtgtgagccctaggctaagtctcttgttcctataaggtcatttagattaactgtttaggtgattgtgaatggcagatgtccccagtgaagctggtggcttcagtatttagttccacctctggatttatttttggcttcacaagatttcccatactttctgttcaaattagttaaacattaaaatatatatgttttaaatatttcaccttgtattttgaacctttttatcataaacattctcagacttttgtgatatagaagtcaatacaatagtagatacgatgtaatgtaccctcagattctataatcgtcattttgtcaaacttgcttaaacttgttcttcttctttctttttatgtttttattttaatattttagagttctaatatcaattactacattttataatactaatgtatataaccatacaaatagatattttctatataatcacctagaaagttaccaatttgtctttactattatctaatacatttgaatataagtcaaattccccttattatttcaaaaatgtcattttatggttggtttgtttaaatttgggcccaaacagggtcaacattttgcctttcatggtggtggtgctttcttttaaattccctttaatctagaataggtccttcctttttttaaaatttaatgataccaatgactcttgaaaactaagacagttgccttatagaattgttttcttttggtgtataaaatgtttttctattcttcatattttctataaactaaaaaataagtataaagcctggattatatttggattcaacttctttagcatggatacttcacagatggtgcatgtaatttgtattacattaaatcagaaaatatgtatatctggtaatcataattttagtgatgttgaaatttatcattggtacaggttttgtcagcctgacccttacattacaaatttccccattagtcttttcacataatatcttttacaatctattgatgattgttgccttttaacattttttcaacataatttgccatttggtgattttctaattctgtcattaatctacatttatcagatgaaaattttctgaaaaaattttcctcacagacgaagattttagatgactctgatgctcagtttgtgtaggagaagatgtttaattctttttaattgccmattttcatagtaaatggttgccactctagctacctcctgtgctgaaatgagttgttttttttttaattttccattaggtttttggcttttataatgtgaagcttcaaggtgtttttataaagagaaggattataaatcaaaaataaaaatcaagaatactaaccacatcactatacttgggtttcgtatttcttgggttcatgaaaagtttttagacttggctttttctagaatataagtaccttccatatggacacaagagtagatcttaatttagtaaggattcaaaattgaatttctcagtcctttaaaccctagtctatctttagtgatgtcattatttttaagttcctgtttatcctttaaggtcaatgtgatcctacatttctagaatgattttcctaaaatttatttttaatatttcatcccttcacctccctgccttcatccatagaatctgagttgggataaataacaagcctatcctcaatctcctttacatagcaaaaactaatatgggtaataagacatttgtcaaatagtgatttgtgtttttaagtcatgctaataataaaaattaagaattaaaaagagagagagagagataattaaagctctatggaagtgaatttcttagctgccaaagaaaagattgatgataatttaagcaaacttagagtgaatactttgtgaacacattaacatggctatttctcttcctgaccttatattttatcaacatcttattacgtggaaaaaaatgaagacatcaacatagtacaataagcttatttaagaggcaaatgggtcaagtttgtatgaaatggaaattatgaaaataatcacaaacaagtcattgaacaggatttaattaataagttatacaaaagaaaggctctgcaataatgtgttcaacaaccaaagaaggcatattctgcttacaaagtatgtatgataatctaagataaatgtgtgtaacataatggaaaagcaaatgtataaatracaaagcagaggtagagatgttgttttaggtagcaaggatctagcctcaataacaatcagtattaaaatatggccagctaacactgtaattaaaaaaaaaaatattccagttgctcttccaaaggcaacctttaggttaatactaaaacggataaagtcagatgatcaaaattttaatattcagtctatctgtagacaaaaagatagatatccacattttaaaaaccctgatttttaatgttttattaaataagttttattgcacatttatagaagataaattaaggtataaaaaactaaatgtaaagtctgtattataaaatgacattaacatggtgtgccatgttatcagactcagcagcattgtcagttggtaagttttatatatattgttttcaaagaaccagttggtgaacaaaaacagcgcaataattatagcagttaattcatgcattcattcactcagaaatcatatgtcttgtatcatgtgctagatatagttccaagcactaattaaacaaagattaataagacaagaacccttcttttaaagaactcagtctctttggagaattattcacataatcagttaataacagtccactatgaaaagtgttataatgagaatatggaagatgtgctgtgggtaatttgaaaataatgggtattcttgctttggagacagctttttaaagacagagtttctcgaggtagtaactttaaatttgggtattgaatataagtctaccagctggagaaaytgggcaatagtccattaaaatctgagactcaagcacatttgtagagacaggaaattataaaatacatattgtatttaggggttaatacacagttctctgtgattggagtagggggtgcatgagagaggacagtagatgagaatccatatgatgtttggtgaagatgggaaagactaagtgtcatgagaagaagcttgggcttttagactctagtgtttatgtgtccagcaaaggttttgatatagttgtatgtagttacaagttacttagtttgagggggaaaaatgaagctgggaagggactgtaggcagagagataagtttggaaggtgttgccagagttgatgagatatgaatcaagctagtggtagtaagaatgcccaacaaggtgacaatttcaggtattctttagaacaagggtgtccaatcttttggtctccctgggccacactggaagaagaagaattgtcttgggccacacataaaatacactaacattaatgacagctgatgggctaaaaaaaatcacagattaaaaaatctcattatattttaagaaagtttacaaattcatgttggactgcattcaaagccatcctggactgcatgcagcctgtgggctgcgagttgaacaagcttgctttagaacataaaatcaattaaagcagagagacagttgaacattatgggttatggtgagaaataatcaataattatcctgaagtgttcaaattgggtggattactgtggcattgagttaggagaatagttggagaaactggtttggggaaaaagttccctgagcttgatttcaggcatgtggaggcttaaaacccaggaaggactataaggaatgggtcctagagatatccttttccccatgaaacaaataattttggaaggaacatatcaagcaagctatttgggatttgactcagtttggtgggttttcattaaagcaaataatttttctgcctgtgaaaaaagcaggaggaacctctcaacgcagagcaaatgtgttcatgtaaagtatcaagaagctcaaaataacttttcatatacatttttacaaagcagaaatgagaaaattatcatccttatgtttatattttagatctattttgtgagattagatccagtgttacctttgatcttcattattagaaatttagtgaaagtatacatattttgttcaaactttagagaaaaacagaagttgaaaggaatttgggggattttaagaacatcttaaaaataatcaacaactcctagaaactaaaagttaaaaataaggatctttgatgtttcaacaatgtgataattcaacgattatttactttctgacagtatttgataagcaagtttcctccttcactagtcattatttcagtttttccccacaagcaccctaactggtatttcttttcttttttttttctttttagacagagtcttgctctgtcacccaggctggagtgcaatggcacaatcttggctcactgcaacctctgcttcccaggttcaagcgattctcctgcgtcagcctcctgagtagctgggattccaggcacgtgccatcatgcccggctaatttttctatttttagtagagacggggtttcatcttgttggccaggctggtctcgaactcctgagcttaggtgatctacctgccttggcctcccaaagtgctgggattacaggcgtgagccaccgtgccgggcctggtgggttttttttttggttttttttttttttttttttttttttttttgactgtttcttaattggaaaaaacaaagtttagagaaattaagtaacattgttgagatcatccagatagtcrtctggagtttgaacgttggccttgcatttgtttcctccacaaactgaaaaaagttcacatttaggactcagttgcttccatctcattcctctcttctcttgcctctctctgtctctctttccttcagttatttttctaaagtatccacccaagtacagtctgtagttattagttaagttcattattcacatatgccagtaactctcgtggtttcatctcttgctatatttttaggtatttggtaaggtgattgtctctctcaatgagcatttgataaattaatgtgaatgtctcagtgctaccaagctactgaatcacaaacttagatgggaactagtggactaaatcttgggaataaatgacagtaataacattcaacattgtttacctttagttaagctaatggaagctgaacacagaaaatactttttccatgttaagaaggaatagattcccgagatgcactactaacagaacttgatttgtcatttgtgactttttagagaaatgtatatttataacactattaaacagaatagccttaaatcaaaaacagaaaatgtggtttgactagtagcatctggaaagaatcaattcctttgcctataatgtttctaagcaaccacaaattgaagcaatgcacagatagttcatgggaagttaaagctataatttttatatttccataattttggatttgctgtagggcaaagacactgaaagctaatttacacattctgtctttatttattaaatacaaatttcgtgtgatggcaaatcatcacagctttttataagcaaatgggccttttcaggaggtccaatttaagtctttctttgttgtgtataattagaatctgcatatgcggtccagcataattattttgtgaaataaaaagcaacactgaaattgtgatgttaatattataaagctgtgaatttattaacacacttcagatgctttctgaattttaaaaattctaattggattggattccatcattaccaaacaatactttaatgcacctatgtacaatatgaatctaaatgtaagtcgtaagttttatactgtttggtatgtcttcatttgcatttttcagattaatttaaatgtaaatatactttacacaaattaccgcttaaaatccttgaaagtaaatgccaaaggtctgacacctaacaagaagatctgaacatgcaattttttaaaatcacatactaaaatacagccatttcagaatattatgatttttcaaaatgactgcccttttccgtgaagtgggttatctttttaataaagtaaaattagagactagctgagaggaaatgaaataaatcttccttatataccatgcaggagatattattttctcatagaaatttaaagtacgtttacaaaagttttctaaaagtagaaaattttcatagattatatcaggacttttttgttaactaaccagttgagctcaccatgagaagtataggaataatgtttaatcttttttgggagggaagaggtttggtaggccatgtttaatcttacattttaaaatgttaattgatcttagtagtatgtcgattctgaccaatagaataagcaagtttgctgtgctggtagaaaagattttgtggccaggcgtggtggctcacagctgtaactccagcagtttgggaggctgaagtgagtagatcttttgagcccaggagtttgagaccagcctgggcaaaagggcaaaaccccgtctatacaaaaaattagccaggcttggtggtgcacacctgtaacttcagctacttgggaggttgaggtgggaggaggatcccctgagcctgggtggttgaggctgcagtaaaccatggttgtgccactgttgtaccctagcctgggtgacagaggctatcaaaaaaaaaaaaaaaagattttgtatactacatgtattttttttcttttggtttataaagagatttgtgttatctgacttcttatttataaatagtgaaatagtgccatattaaaatcgcagcttgtcttttctttttagtaaagtaaaccaaaggctgaaaaagaaccagtagaaacattattcacatctcactgacctctttagatctaaagcgacaaaaagactttggtcctttggacataagtaggcaactggatttataaaaaagccagaatggaaagtgtgaagagtgactgagaatgtggtgggcacatttctccaacatataacctttgataaaatagacccctagatgccctcctcccaccacctgcccacacatgtacgattatagtggtctttattagtatgtgctaactatcagcattcagtattttgctttgaactttggttcctttcagtctggctcaggaacctactccctatactttcagttcaccaataatttcttgaacgcctataacgaacctataacgcagagacctaataggtggtaaagagtcagacactgctttccagaaatagtactcttgtgggagagaatacacacatatgttattaatgctaataaaagaagaaacctgtcttgtgtttctcatagtggtaaaaaggatttgatgctttctgaggccctactgtacaccacacactgtggtaggcacctcactttcagcatcagtcaactctccccaaaatcctatgtggataagtgatttctaaaatcatttaattagttgctagtgtgctagaacttagacctagtctacctatctgtctgaccccaaacttcctactattaccatgccacttcctttatttcaaattggggaaaactaggagattccttggaaatggtggattttaaaggtgtaattacatagtttatttttccacttttaaatgaataatatttcaaattttcataaggattttaagtacctaataaagttgaaaaaaaatacaacttccccctataccacttttaggtgagaggcagctcagatctgtgaaacggttatatattcgagtctatgaatggattgtatatgtcaaacagttgtaatatgcatatgaggaagtgcataattgccaagaaagaggggatatcctcttccttgtaagatataacattctcatctcaggaagaagaggtaaataccctctctcttcagcattataattatttatgttgttcatttgtggtgttttagtggaaacagattcaaaagctggttttattgtttagcagcagagggacctagaacaagtgaaatagcttctgtgaatgtcagtttccccattagtaaggtgaagggataaagtttaccccatatattgttgtgaatatcaaatgtatctgcatgctcctggcacatggtcagcactcaatacatatttcatatcctttcttatgatcctcaaactgtgttccctgttagcgtatctgaccctggggtttctcagtgaagggttttatacagcagttccaaccagcaatctttatgtcacattacaaaatttcagaagggcatatttttaatgctccaaccatgtctgtggcatgaagccttttattgaatagagagccaagtgccaagttacttcaggggccaactttcaacaaaacagttaaagtaaatgaagctattccttgtgtgtatgtctgcccgccccatctccccccaagaaaagctttgtatgacattgaacaagttagcctctctaagcctcagttgcctcatctgaaaagtagaaatgatcacatctgtctcaaactgttgtcatgagatctaataaattaagtattttaatgcatgagaaatattaacattttcttcccattcttgttgaagtcatgaataacttacaggaacttatacttttttttgaagagacagagtagcacagtggtttaaaaaatgagttccaaagcataacaaacctaagttccaaaccaactgtggtggctgggataaggagtctggagctctctatttttttttcatttctaagttaataatacctaaactcacagatttgtgtatttaaataaacttatctaagttatataaggtaatgtataaaacacggccatattgcagtataaaaatgtaaattttggagcaatcaaattgaaaatttcaaattatactcttggctaatgggatggatacgtgatttaacaaggcaaagccattacattgtgaatacgttacctcatgtggagaagtaattaacttcaatttcaaaaaaaatattttgagtagctactagttattatgcagtatactggactctggaaataaaaataattggtaagacactagttctagactatatacaaatatactttttctgtctgttacttgatgaatatttattgggtttcaaacacataaaattaaaaattaacacaatatttattgagtacttattataaagcagaactctactaaactttcatgcattatctcatttgatctcacatcatctttaatgaggtataccttgtgttcacatttaatagataataagacagaatcataaaagataaataactcacttagtgttacattgccactaataaatacaaccaggatgcatctaaagcctgaactcctaatatctaacttagaccacatgttaacaccaaatacrtgatcttcctttataattgtacccttttctctgaatgagcaatttgctttaaatagaggacatgtttacttgatctagtagatggtttgagcacatgctatttttagtgaccgtttatcttgaaatctcaaatccttaccttgggagaatatttatatagaaagccatgaagaataggcaaacatagaatacattgtttttattagtaattttaagaagatgagagaattataagaatgtgaggtagaaagttgtgatatgctgggaaaaaaaagctaaaataagatattttgaaaaagtagattgagcatataaaaagaacatatattacatgttgtgaataaatacaattgaccaaaccttctgtcccattgaaaaatgagaagagctgatagtggtaacatcaggcacttttatagtttagaattgttttcaaagtcactggctgcatagactgtgacaatacaataaaagcacaaaacagcattggagatcttagatatagaaagtaaattacctgtcagtgtctgagatcttgccttttctatttgcattaactagaaaatgtaggtacagggtaagtataaataaagagatgtgtgcatctattacgggctctgatcaaagctttctagagtggtgataaatgtatcatttacggaatagataacacagtgtcttagtccattttctgtcactataactgaatatctgagactggataattgataaagaaaataaatttattcgttaaggtcctggaggatgagaaatccaacatcaggtggctgcatctggtcagcttctggtgaggtccacttgctgtgtcatagcatagaggaaggcatcacatggcaagaggggtacactgagagccaaactcacttttttaacagactcatcttgtgataaataatccattcccatgataacccattacttcactaacccattaatccattaatctatgtatgatccaatcatctctcaaaggcctcagctcttaatattgttatattagggattaagttccaatatgaatttcagatgaaacaaatattcaaaccctagcacacagccgtcgagacttcaaacaatcatcctgcttgaatgggacttgacaactacagttcatgggccaagtctgtcccagtgctggtttttgtaaataaagtttcactggaacacagccatgccattcatttctgtatcatctgtggctgctttcgtgctacagtggcagaattgagtagttactgcaaagatcacatggcttgcaaagcctgaaatatttactattttgtcctcctctgttgaaaaactttgctggtcctcgacttagaagattatttgagcaggttgtttagtttccatgtagttgagcagttttgagtgagtttcttaatcctgagttctagtttgattgcactgtggtctgagagatagtttgttataatttctattcttttacatttgctgaggagagctttacttccaactatgtggtcaattttggaataggtgtggtgtggtgctgaaaaaaatgtatattctgttgatctggggtggagagttctgtagagatgcctattaggtccacttggtgcagagatgagttcaattcctgggtatccttgttgactttctgtctcgttgatctgtctaatgttgacagtggggtgttaaagtctcccattattaatgtgtgggagtctaagtctctttgtagggcgctcaggacttgctttatgaatctgggtgctcctgtattgggtgcatatatatttaggatagttagctcttcttgttgaattgatccctttaccattatgtaatggccttctttatctcttttgatctttgttggtttaaagtctgttttatcagagactaggattgcaacctctgcctttttttgttttccatttgcttggtagatcttcctccatccttttattttgagcctatgtgtgtctctgcatgtgagatgggtttcctgaatacaacacactgatgggtcttgactctatccaatttgccagtctgtgtcttttaattggagcatttagtccatttacattttaagttaatattgttatgtgtgaatttgatcctgtcattatgatgttagctggtgattttgctcgttagttgatgcagtttcttcctagtctcgatggtctttacattttggcatgattttgcagcggctggtaccagttgttcctttccatgtttagtgcttccttcaggagctcttgtagggcaggcctggtggtgacaaaatctctcagcatttgcttgtccgtaaagtattttatttctccttcacttatgaagcttagtttggctggatatgaaattctgggttgaaaattcttttctttaagaatgttgaatattggcccccactctcttctggcttgtagagtttctgccgagagatccgctgttagtctgatgggcttccccttgtggataacccaacctttctctctggctgctcttcacattttttccttcatttcaactttggtgaatctgacagttatgtgtcttggagttgctcttctcgaggagtatctctgtggcattctctgtatttcctgaatctgaatgttggcctgccttgctagattggggaagttctcctggataatatcctgcagagtgttttccaacttggttccattctccccgtcactttcaagtacaccaatcagacatagatttggtcttttcaactacatggaaactgaacaacctgctcctgaatgactactgggtacataacgaaaggaaggcagaaataaagatgttctttgaaaccaaagagaacaaagacwcaacataccagaatctctgggacacactcaaagcagtgtgtagagggaaatttatagcactcaatgcccacaagagaaagcaggaaagatccaaaattgacaccctaacatcacaattaaaagaactagaaaagcaagagcaaacacattcaaaagctagcagaaggcaagaaataactgaaatcagagcagaactgaaggaaatagagacataaaaaacccttcaaaaaattaatgaatccaggagctggttttttgaaaagatcaacaaaattgatagaccgctagcaagactaattaaaaaaaaagagagaagaatcaaatagatgcaataaaaaataataaaggggatatcaccaccgatcccacagaaatacaaactaccatcagagaatactacaaacacctctacgcaaataaactagaaaatctagaagaaatggataaattcctcggcacatacactctcccaagactaaaccaggaagaagttgaatctctgaatagaccaataaaaggatctgaaattgtggcaataatcaatagcttaccaaccaaaaagagtccaggaccagatgrattcacagccgaattctaccagaggtacaaggagaaactggtaccattccttctgaaactattccaatcaatagaaaaagagggaatcctccctaactcattttatgaggccagcatcatcctgataccaaagccaggcagagacacaaccaaaaaagagaattttagaccaatatccttgatgatcattgatgcaaaaatcctcaataaaatactggcaaaccgaatccagcagcaccatcaaaaagcttatccaccatgatcaagtgagcttcatccctgggatgcaaggctccttcaatatacacaaatcaataaatgtaatccagcatataaacggaaccaaagacaaaaaccacatgattatctcaatmgatgcagaaaaggcctttgacaaaattcaacaacgcttcatgctaaaaactctcaataaatttggtattgatgggacgtatctcaaaataataagaggtatctatgacaaacccacagccaatatcatactgaatgggcaaaaactggaagcattccctttgaaaactggcacaagacagggatgtcctctctcaccactcctattcgacatagtgttggaagttctggctagggcaattaggcaggagaaggaaataaagggtattcagttaggaaaagaggaagtcaaactgtccctgtttgcagatgacatgattgtatatctagaaaaccccatcgtctcagcccaaaatctccttaagctgataagcaacttcagcaaagtctcaggatacaaaatcaatgtacaaaaatcacaagcattcttatacacaaataacagacaaacagagagccaaatcatgagtgaactcccattcacaattgcttcaaagaggataaaatacctaggaatccaacttacaagggatgtgaaggacctcttcaaggagaactacaaaccacttctcaatgaaataaaagaggatacaaacaaatggaagaacattccatgctcatgggtaggaagaatcaatatcgtgaaaattgccatactgcccaaggtaatttatagattcaatgccatccccatcaagctaccaatgactttcttcacagaattggaaaaaacttctttaaagttcatatggaaccaaaaaagagccctcatcaccaagtcaatcctaagcctaaagaacaaagctggaggcatcatgctacctgacttcaaactatactacaaggctacagtaaccaaaacagcatggtactggtaccaaaacagagatatagatcatggaacagaacagagccctcagaaataacgccgcatatctacaactatctgatctttgacaaacctgagaaaaacaagcaatggggaaaggattccctatttaataaatggtgctgggaaaactggctagccatatgtagaaagctgaaactggatcccttccttacaccttatacaaaaatcagttcaagatggattaaagacttaaacgttagacctaaaaccataaaaaccctagaagaaaacctaggcattaccattcaggacataggcatgggcaaggacttcatgtctaaaacaccaaaagcaatggcaacagaagacaaaattgacaaatgggatctaattaaactaaagagcttctgcacagcaaaagaaactaccatcagagtgaacaggaaacccagaaaatgggagaaaattttcacaacctactcatctgacaaagggctaatatccagaatctacaatgaactcaaacaaatttacaagaaaaaaaccaacaaccccatcaaaaagtgggcgaaggacatgaacagacacttctcaaaagaagacatttatgcagccaaaaaacacatgaaaaaatcctcaccatcactggcyatcagagaaatgcaaatcaaaaccacaatgagatatcatatcacaccagttagaatggcgatcattaaaaagtcaggaaacaacaggtgctggagaggatgtggagaaataggaacacttttacactgttggtgggactgtaaactagttcaaccattgtggaagtcagtgtggcgattcctcagggatctagaactagaaataccatttgacccagccatcccattactgggtatatacccaaaggactataaatcatgctgctataaagacacatgcacatgtatgtttattgcagcactattcacaatagcaaagacttggaaccaacccaaatgtccaacaatgatagattggattaagaaaatatggcacatatacaccatggaatactatgcagccatcaaaaatgatgagttcatgtcctttgtaggggcatggatgaaattggaaatcatcattctcagtaaactatcgcaagaacaaaaaaccaaacaccgcacattctcactcataggtgggaattgaacaatgagaacacatggacacaggaaggggaacatcacactctggggactgttgtgaggtggggggagtggggagggatagcattgggagacatacctaatgctagatgacgagttagtgggtgcagcgcaccagcatgtcacatgtatacatatgtaactaacctgcacattgtgcacatgtaccctaaaacttgaagtataataataaaaaaaaaattattaaaaaaaaaagaggattatttgaattctggttttcaggtgaggtagataaattccccatagaacaaacacttgccagacatgtgaagtcttctgaattaaaaccctgatttttaaaaaagcagctgttataacaactcttcttatgaacctattaatttggaggaagtgattaattcaccagggatttcttagagttaccattagactgctttatgaaggcatttactctttcaaggagtaacttttagtagattctgagtactagtactgaactgggcgtgagaaatacaagttgaatcagataaagcctatatccttgaagaatttcaactgttgtggtgtttatactgtatctttatatttaagtttggtttctagtttgcttttttattcaatccatcaatctctaccttttaattgaagagtttagactacttacatttgatataattattaatatgctaaaatttaaatatgttatcttgctatttgctttctactgctaacctctgttcttttctcccattttccctgattgcttttgagttgagcctttttgtgattccattttagatcaactattggcttattacctatatttcttttaattttatgtggtttcactagggtttatacaatttatcacagtctatctttaaataatattataccacttcacatataatgtgagaaactcacaataatatgcttttaactctgcacatacctcttgtgcacaattttatttctctatgtaagtcatataatagattactatcatttttgctttaaatagtcatttatatcttaaagagattaaaaatgcaacaaaaatataagtacctggatattgatcatttctgatgttcttcatttctttgttgtagctataaattctgtgtatagatatacgtttcctctgtcgttatttttctttgcccacaaatcttcctttgacctttattgtggtacagatttgctggcaatgaatattataagattttgtcctttttaaatgatatttttgcaggttatagatttctagattgacagtccttttctttcaggactttaaagatgtcactgccatatgatctgaatagttatttatgaggaggggttgctgtcatcctttgttctttatggaaagtaagctttttcttttctggctgcttttgaaatttttcactttgtctttggttttcagcaatttgatcatgatgtatggttttctttatgttcattctgactggggcttttgagcttcttagatctgtgaatttatagttatcaaatgtggaaaactattggtcattatttctttaaatagtgtttttattttccctcccactttctaggactgtacttggtatcattcagcatatcactggcactctgttcattttgttccagtgttttaaaatctctgtgttttaaacagtttccgtcactatttcttcgagttaactggtttcttcttttgcagcatcttaatctgtggttgatcccatctagtgtatttttcattttgggtatctttttttatctttatatgtttcatttggttcattaaaaatcttccatttctctcatactcttcatcctgtttatgtttttgtatacatttttacatatgtaaagcacatttttaaaattagcttcttaaacattcttacctattttattatctctgtcatttctctattaattcatttttttcctaattatgggtgataatcaggaactgattacataatccacacttgtacctctctgactctctgtctgttcatgatagtccttcttatccttcaaccctggtattctgaccacaaattctacctgccatggctacccaaaacaatttctgtcttcagtgcattggagaaactagactctgtttgagtcccgtatttctttctctttcctgaaaactgcctccaggcagtaagctggggcaattgtggagctcaccttatttatttcctttctctcatggatgatagggacatcaaatgactgaaaattgttgaatcatatattttttcttgttttccagttatttatagttggtgggcaatttccctcgtagctaatttgggaggatgtgagattttatttgagccttggaagtataagtaggaatttggccctcaaatctgatttaataatttatttgaatttaaccagttttcttttctattcccttgattgtcttcttcaaacctttacttttcaagccttctacccctataatcacattttttttagaattggatttctttaaaaaaaattgagataatgtggctataaggcattttctctctcatcttctcatattttcctagtatttgtcccttcagaggcatatttatttcatttcctttcattgaaaagatacctgttcacctgcacgattgattgcatcccattaatagttttggggtgatggggtaaaattacacatttagaaactagaatagattgcattactaagctaccaattgcattttctttgtgtaagagttttagaagctatttttttctctagtcttaagaattaactcatcaaatatatcaggaaatttactgtaaaatgtaaattatcagagttcgatgaactgaattgccaagatttagaaccaagtgtattactgtggagaaagcataataggataatctgttatcttaatagattaatagtaggatgatctattatcttagtgtagggagccataggaagctctaatatgcttaagaagaaaggatgacattttatccctcactcattgataggaagggctaaataaattagagtagaagcccaaagtgtaataagcactgtttttgacatctctttaggaagaatcatttgtaaggaagcttggggatttcctaaaatatgagaattgtttctccttagtttcataaactctctgaaagtcgttgaactttttttcacttggaaaaactaaattccagacaccctagacaataattttcaggccacgtaacctttgctaataacagcaaatatttcgggaaatgtattaactcttttatattttcagggcaacattaatgaattttaagccaaccaattcctcagtaattctgcagtgaaccaaaagagttaattcgtctagcagagatggggtgttaagattaaaggtaaatctgcttcaatgagatttgttaagaaatacagcacaaccagggagttacagattagaacaacagcatattgattcatttctcagttttaccatttctttggaatatatttgttcctcaatccaacttggagaaaatttgtaatactccagaaaaagaatatgtttaaaggcttattcagtctagggaagcatattattgtattgaaaatggaatcattttcttggccatggaggtcaaattctggggtcagatacacctgggtttaagttctaattcttctgcctgttgttatatatactcatatgctcatgtctccacacaacctgacatgctgtatctctcccccataaaactgacaagtaaagaacaatgtaagagaaatgatctgggttgaaatctcagcttttttattttctagttgcatggccttggataagttgcttaattcatatgtccctcaatttctttatgtatgtagaaatgggatttggaggataataacatctgataggttgctgttggatttaattagttattatacagcaaaatgattattacctttttgttctaatggtattacacataagtcattcagttataaaactgagtatgtcctatttgtgggagctggaacagaacatttcctgacactatgtctcacctcttcactgtgtcccagcagccatttaatatgtatgtgtgataatagccaagtctttgttcctgggtggttaatagagttatttttccaaataacctagagagaagttaccacctcagagttatcactagcttccccagggcttaatttcagaggtgttagagttgaaaacagagaatcatttttatctacttattacctggcacaaaaaaagaaaatgaaggcatggaaatcggtttcatataccaatgaaagtaggtttgcttttagtctcagctctaaaaaaaaaaaaaaaaaaaaatactgggacttgctgtttgatgaagacagaagttataagaacaggtgcccttactgagctcagcatcatctgatagtggcttcaaacaatgccaagtcttaatgagggctgcatttaataaaatgccacagtcagcttttatcaaggccactgcaaaggacatagctgcagaaatgatttagaaagtgtgcatgagtatgtgtgtgtgcctgcacacwtgtatgtgtttaaataatggctgacatgttgagtaccttctgaatgagcaatgagatactatacggagcagatttttgtagattggaaagcacaattaaaatatgggtaattgtcattgtagtattataatagtactataaaagtatatgtagaaatcttttatttcatttttgtctgtttccaggtaggtatatataccaatgttttaattctagatgtggccaacttctagaaaattattacaataaccctcctgtacattaagaaatttgagactcttacctactacatgtttcatttaatgccttcattaaaaaaagatttaaaaataatttgtttttatttgccttggaaaataaatatttttcttactttcactagtaataatttgaaaaataatacttatatttagaaaagaaacaacaggtagtcaagaatagtgggtctttgttgttactgtgtgaaattcagtttttaatttactcatgttattaccatatttgttcacagacctctcattctgccccctctacttttagcagtacaatttatttgttcattcaacaagtaatcctgagcacctgctttatgtgccttggggacacaagcactgccattgctcttaaacataaaatacataatcacccaaccatntaaaattaaactgtgataggttctatgaaggagaggaaaatgctgcggtgaaaacatgtaataggatggtatgacctggtcagcgaggttcctgaaggctttcctgaggagaggaagacatacatggacttggagtcaaaacatctgtgtgccttttgatacattatgtttccaaggctcatggtgttttctgtaaaataggaacagtaatgtatatctcacatgttgatgtgtggattaaatgagacaacaggaattgcctcctatgtcttctatccctctgtagtttgctgtctacaggcagccagagctatctttttaagaagacatccagactgtgctgtctcggctcatagccctttggtggctttctctcagtctcaggtaaaatctgattcctcatgaggctccaaatcaattactttttgctcacctctcctacctcgcctcttactccacctacattctttgctcactcatttctcatcgtgcaactctcttactcattcttgagcacatcaaaccaagctgatttctacccaatagcccttgaactttctggcaatttctcttctctctctggaatagtcccctccaaatattcacatgactcattcttgcacttcatttatgtcacttgctgaaatgtcatctttttaaaaatacttttccaggtccctctgtctaaatttcctctttctatgttcattctctaccctggcattatctgatcctctttcccttgatcctcctttgagcgttctttgtagaagttattgataataataattagaataagaaaacatcaataatactatttattaataatatttactactttccagactcttctctaagctctttatatattttaactcatttaatcatgattataaatcagatagataattactattgatctcattttacaggtaagagaataaggcacacagccattatgtaacttacccaaagtcacacagctagcaagtcatcatgtaagcatttaaggccagatagtcttgtttccaaatgccatgctcttaacaactatgttttgctgcctcttagcttgggattgtcttatacaggttstttgtttgttctcagttttcttgctagcatataagcttcgtgattcagattgtatccacagggcttagaacaatgcctcacatatggtggatactcagtaaatgtttgtgaatgaatagtagtgcatcaaagcatgttgttcagtgcctagaaaaagctggtctttattatgtacatttgtggtaattacaatttcctgctatagaaatggataaagtggactgctttccccaccaaaaccaaaaacaaacaaaaactgagtctgaagcatttatcttaggtgctttaacccttttcttttcatgtcccataccctttgatgttgtgaaacttctctttctgcttttgcttctactttcaggttctcagtgctcccttaatccttctatttggaaataatgtgaaattttcacatgaagtattgacaatctagttttcacttagtgataattcaacaggattctgtttgatgtaactcaggtataacattcagtaaatatttattgaacagtgacacatttggacactatgcaagatgctgggaaaatcaggtgcaagtcatgttctgtcccttcaggatacactaacccttctaatctatcttttggcacgatttttatacaatgtctcatttacttcaaatctttagtggctttgagaggaaggtcctttgtgatctttttttaaaatttctgattcttcatcttacctcttctcatgctctaattgtactaatgactctctaaagctataaccatagttcttagttttgggctgccataataaaatatcataaactaagaagcttataacaacaaaagtttatctctcacagttctggaggctggggaatccaagatcaagctaccagctgatttggcgtcaggtgaaggtctgccttgagcaccttcttgctgtgtcttcacttggcagaaggggaaaggcacttctctggggactcttttataatggcactaattccattcatgagagctctaccctcatgatccagtcacctcccaaaggtcccacttcctaatatcatcatcttggtggttaggatttcaacatataaattttgcagggatacaaatattacatctacagcaatagcggatgtccgttttgccttcatataatctctttcctcccttcctgtgatcctgtcatctcttcatcacttggctcatctacttgtccttcaaatcctagcacaagtagcaacacctctaagaagcattcacaggttctctgttgccagaacatcctactcatgcttgtatcatcttatatgatcctattttctggggtaggagaactatacactgtgaactaaagtagggcttatgcatttaccactcattcccataagacattaccttgttcaggagagaagtcatgcttgctatatagtaaatgttcaaaaattggttattaaaaggaggcaaagaaggtaatgtccttttttaaatgtcccataccctctgatgttgggaaacttctccatctttctgtttttgtctctactttcaggtcttcaatactcccttaatacttctctttggaaatggtatgaacttttcacatgaagtattgacaacctagtcaaaccgcatttgactcaaattgatgtagtgagcctaactgtacaataaccagcttcacaactctttagggagctgactctgggttgcagaggtggctggtgtgatgtaaagtggtagatctagggtttgacagatggttctaaggtctcgagtttaattctctgattctgtacttctaaaggcaacacttctaaggagtcagtgagagcaattttctatagtttatctactttaataagaaatattcatatttttagcaaatagcatttttytcatccctgacaacaaagttattctgccaggaggaaaatgttttgagaaaaaaaggtgcaatttccttctcaaaattaggaaattaaagctgaacatagtaggagaaaaggagacgatatgcaggcaagtagaattttttagtttaaatttactaatgcaaatttattgctaaaacattatatgtaagcagtctaatacacctttataattcacacaattaacaaatgtctactcaatacttataatgcattgagtagtttaacccagagttgactactgaaatcttccactttggtacatttttatacattggattatttttgatgttatgatattttactcagatgccaaagaaggaaatatttacttaaaaatactgtattgtggaattggaataatgattaaatcaacaccttcattaattcagattttttgagaacttacattgtgttaggtgctaatgaagtaagaaacaaaccaggcacaccctctgtcctcctagaggttatttgagcatttaattatttggttatgattttgataagtgctatggaggagaggaatgagagtggggggatcttatatcagctatctgaccaatcagggaggttgaggaagatctaacataaattaaacctgagtgagaatgttaatgattagtagaagttggttaggtaaaataaatgatgaagttgtgggaaaatgctgttacaaacagaggaatcaggctttgcattctgagagaagacagaacacagtcagggtgacagaagaacacagagccaagaagacaagataaaaatgatgacaaaaacataccaaacatgaccttgaggataacattaagaatctgaaatgatatttaaatagcagtgatcaccatttcaaagttattgagcagatttatattttagaatactatggctgttgaataaaaggagacaatagttaaaaagccataactgtaacttgatttaaggtaatctcattagagacgtggaggtgtgggtgaattaaaaaaatattttggagatagacacaacaggacttggtgactgatgcatgtgtggagatgagggagaggaatgtcaagaatgactttcagatgtatagtttgtgcagctgagtgaatggcagtgtcattcaccaagggagggaacactgcaggaagagtccaagtttaggtggaagaargygagttcagtttggggtatttgaagtatgatgcgtctctaagtctttcaaattgtcttgctaamcaaatcctaaaactgtctattggatttaggtattgtagatatctttggtagccttaaggcaagyggtaaaaaacagttggcagtaagttgagaagcaagtgagaggtgataaaatggmgagagtagagaaaactctttttgagaggtttgtttgcaaataggagggagacacaatgatatctggagagaaaatatattgaaagtggaacagatatttgaacacatttaagtgcccatggaaaaatatctagtgtaatgggagaacttgaaaattctgaagacagaagagtaatatgtgttgtaaggaagagagtaggatccagagaacagaagaaagaagtaaaactcttctatgtgttctctttagctgtccctgagatttagaaacttaagacaaaaataaagataatttgtgagcacccactgtctgccattcatttttacaagtcctgcttttctctttcataaagttccacattgtctgttttaataaacagttgccaggtggcatattaccccttcccagaatttcggggaatattaccacaaagttattttaagacattaaaaatatcttagtgccttggcctaaccactacttgcgccaatgaattgagccagcagataagcaacaatgtgtatattacaaaatggcagctccttcacttacacccacaaatctcccgcaggaatctttttttgtggctcaccctagctggaaacatacaggaaacaaaattctgggaaatgtagttcagcctagccaagttgatatattacaaaattacaaaaacaacttcatcatttcacttggtttcactatgcattttattctttctatcgttcccctcttcacacatagagtcacttaatagtgtgtcaagggcttcatacataatacctcatttaatctccacagcaaccttgtggtgtgtgtattattacccctatttataaggaaactccttgtctttcccaaggttcatgagccagaatgtggtagagctataatggaaatcaaggttttaggacttctagtttggcactttttcagctagtaggagaaaaacacatctacttcatgccatgctgtggagcaagagcgggagaaggtcttcttttkgttggtgggaacccatcttcctttttccttagactgcattgcctcatttgtttaaaaaggttctatgaatcaataaacctttccaaaggcaaggactatgagaaaatatcatgtggtttaggcacaaagatggatactatttacctcaagaaatttgtttaakatcccatctgaatctagcaatcctaatatttcagcccaggaatcttcttggccaagagctgtcattcttgagagctatgactatattttaattactatatggatttatatatggagcatagtgcgtccattctacttctcctccattgttacagtctgttctaattagtgtttcaacctaaatctgctgaagcaaggtccttttaagtcttcacctcatgccaagaattggaatcaccactttcctaagattactggcaaattaatatttctgctgactacaaatttgtcaaaattacaagttctctaaaaggacaataaagggaccagacttatggagtatccactatgttccaggcgctcagttaaaatactgtatatcaataaatcaaatgctgttatatatgtcacagacccatgaagaatgtaccattaatattttttaaggtaaaagacataaagttcagagagattaattaacttgccaaggtagttaggttccgagcattatttatttatataaagtttacgtgagtatgtatgcatatttgcctcttatttgaggaggattttaatttgttttataaatatgaatataatgcatgaagaaaaataagaataaaattaggggaaatagtcagaaatatgagaggacctgggctgaaaaacagatgaagtcaggggagcaccttttatataatatatgccacagagatcccctgtatttactaaaagtcaattaaaactttaattctgggttaattttggaatcaaatgaaaaaagaaaccatgataagtgttattatttacaattcctgtaagatttgaaataaactttttttttcatctggagaaacatatttttcctggaatttaaagtacagaaaaatatttcctgtttgtcctcacatctaaagttctgtataatagactgtacagtgctctccaaaaaataaaatcctktaatacaggtagataggctgatgccaaaccatgactctctaaaaagcatttttttacattgaaaaggggagggataggaataggaaaacattgatttggtctgatagattgctttctgatggcctagattaattcaaagacagattttagagtatctagaagcctagatgaagaacaaattatttagcaaatattccattaataccatttgttcagccaaattttaataagtatgaaaagtgaaaaggaataatagattatacctgcagtgcaaaacatggcaggttataagtagagccatattcattaggaatcaccccaatgagggataacaacattaggaaacatttattgaatgattactatatgctaactgtataactatatgctaaatgtatcaactcattccattctctccagtttcttaggagggttcaataacccagtattgacaatggcatgaatggaagaccactccgtgtcttcatggtggttagctgaaggaacatctgtggtcaggtgtaggttctcaatatgtcctcctaggtatattctcttacatagatgtggatgagtaaggcctcaaagctctatgctgtagaacagtggttttaaatacattttgtgatacttactcctttgcatatgtgataaaatatgtggagcctatttctggaaaaatgcaaatgaacacaaacattttaaatgtaatttcaagaggttcatgaagcccctgggacattcctgttaacctcttcaggttaaaaacctgttgaaaagtatggtcctcgtcattttagcctggattttttttttttttttttggggggggggacgaagtctctctctgtcgcccaggctggagtgccttggcgcaatctcggctcactgcaagctccgcctcccgggttcacgccattctcctgcctcagcctcccgagcagctgggactacaggcgcccaccaccacgccccgctaatttttttgtatttttagtagagacggggtttcaccgtgttagctaggatggtctccatctcctgacctcgtgatctgcccatctcggcctcccaaagtgctgggattacaggcgtgagccaccgcgcccggcctagcctggatttttttaaagccagaataaagattcatcttagcgatatatatatatattttagaggcagagtctcactgtgttgcccaggctggtcttaaactcctggtctcaaacaatcctctctgccaaaagtgaccacattggtgtatatttgttgataagtatttcttcttctacaacaattagtagggccttttgttagttaagactgttcagaatttatgaagataaaagtatgtcaactacctgtgaaggatgcctgtatttatagtcactatggcacatgggtcatgttagacctactgtacatgaccgtgcaaagcatagaagtttcacatccaagggtgtgtcattcacaatgtagatatatcatagctttgcatatttctcatgacggcttttaagcagtgatwttttactaataaaatctgattattcagaccctttttccaaagggttgaaataaaatataaaagaaaggatgccattttcaaaccccagaccttacaaagttgcagaacttcatctggttactaaagttcaagtcaaaactcaaaaaagaaggtgggggcagggggtggccatagtacatccygctttagacaccatgcctttgggaaatattttctgacccatcaatattctgtccccagcacccctacttctggctttactaataagatgaaaatcatatttataataatttgggtcaatattgagatcatgcacttagcctgccacacgaggaatggctaaaacaacttgaggttgtcaaaaagttaaaaccgggaggtaatctaattgaaaaacttttccaaaaagtgtttttccatgtgtattactttgttaggcttctaaaacaaagtaccccaaattggtggcttaagcaatggtaatgttttgtctcacagttttagaggctagaagttcaacattaaggtgggttggcaaggttggtttcttctgaggactatgaggaagctctgttccatgcttctctcctaacttttggtggtttgcttgcaatccttggcattccttggcttgtagacacatcatcttaatctctgtttctttgtcttcatatggtgatatccctgtgtgtgtacaaattttcccttcttttaaggacagcagttattttggattagggctcactctaatgacctcttaaaattgactacatttacaaagactctatttccaagtaaggtcacagtcacaacaggtactaggaggtaggacttcaatatatcattttggggtacttaattcaacccatacaccatgtgtgccataaaaatggaaaacattcattattagaatcccctgtcatagcttacctacatgcattagcatattaagggtttgagaaattctgcagctaacaaacctaagttatttattccagagatccctgaatattactcttcctagcatacctataaacatcccatggaatatctttcttcttggatagaagaaaaacatagacttgaaagcaaatatgtagaatktagagtgagatctagaataaaatttgaattctatcatttcctaactgcctgacctttggcaaattacttaacgtccttgagctttatttttcttctttagtaaatgaatgtaattatttctacttaataagtttgttaaatagtactagaaaagaaaataatttatctatgctaaataaattatttaccttaggtacagggcttggcacatggctcaaatattataagtaatgataagaatgataagtaataataagagtgacactatatgatatttgttgagcatttactatgtgtcacatgctttccatagtactctcacctgtgttatctgttttaatcctcataacaagcttgtgaatgttattgttgttccaaattttagattaacatacctyatcttagagatataattactcaccaaagatcacaaattgtcagaatggggatttaaacccagatatttttggctgtaaagactcataaacccttatgcaatctgtatcagatagtgatgatctaggctacaagcagcaatgtgcctaagagtgacaaataaacattatttttctcacatattatgaactttggaggtaaactgccattatatcagggctgacatctctgtaaacctcttggccatttcattgtcacaaaatgggctctgcatctctgaacatcatgtactatttcagcatagggtgctaggagtgggttgtggrgaggcatcaataatgtctgttttatttgtcatgaccacagaagcttttccagatttttcctccatgtcacagaattctgcttttagttcattggccagaattcaaacatatgaccacacattgctgcgagaaagactagaaatcaaaaacattctgcttttccagaacctatagtggagatagtcaagggagagggttgagattgatttcatttccctctagagggtaaaccaaatatcaatgggcagaattaaccaggaggaaactactggcttaacaaaaattataagtagaactggtcagcaatggaaaatccaagtaaatggcttacgttgtgggcatgatagaaatctcgatatacaatgtattacatatgttaatattctcaagkggtcacacatctaagaagtcatttgctctagccttcacccccaccccaatgcatttatttattcagcagcaccctaaccaattactgccaagcttctgtctgtgcacagctgggtgacactttccatatcattcaaaactcattaacagccatctaccagagaagtgattgacccccacactgagatggtgtttttattagatggctgtatgtgacctttttagccctgagatgaaccacaaaatagccataattactttttaaatattatctgcaattatttagtgaaacgactatcctagatacattgaacattagggaaagaggtcttgaaaggcatttcataatgcaacatacttactttacagataaagacagtgaaacccaaattttcaatagtagaatcaaaatgaaaactgcagtctcttgggaggccaaggacagtggatcacgaggtcaggagattgagaccatcctggccaacatggtgaaaccccgcctctgctaaaaatacaaaaattagctgggtgtggtggcatgtgcctgtaatcccagctactcgggaggctgaggcaggagaattgcttgaaccagggaggcgaaggttgcagggagccaagatcgtgccactgcactgcagcctgccgacacagcaagactccatttcaaaacaaaaaagaaaactgcagtctccagattacagtcagtaagataaatggaaagagcacttgaatacttgaattagtttcagatctaggttcaaatcccagcttaatcacatgctagctgagtgaccttcagcaagttaatttctcaagatttacgcttaccacttttttacccagctaactttcataaacatgtactgatacctgctgtataccaggcatatataagattcaagatgcaaaattaattaagacactatgctaagtttggaggcgcttataggctagagtgaagggaagacctataaataaataaacaaatgaaatactctctaatacaggaataaatgygagttagccatagaaaggaatggtcagatccatttgagagtatcaaagaatactttgcactatatgacttaactgagagccttgaaggaaagagtgttggaattcaccttggtaattagtttcwgaaaaaatttcacagctatgaaataatatgtaaacacatagtagtttttatttataaaaataaaatactacaggtttctgatgactgctttgataaatagaagagaaaacaccttcagaagtactcttttctttactgcttgttaacccactgcctttccctttataccaaagggtagcaaactttttaaacaaagrgtcaaattgtaaatatttttggctttgtaggccagacagtctcggatactactattcaagtctgctgatgtagcagaaaagcaattatcagcaataaatagacmaatgacctggccatgttccaataaatctttatttgcaaaaacaggaagtgagaaggatttggcctacaagttgcaatttgctaacacttgctctataccatgaagcctcacaggtaatccaactctgtcattacaaagtaccagagaaggattttgaaacctcaggttaaaaaaaaagaaaagaaaagaaacatagattgtgacaccatcttcacttcaatatttgattctcactgtaggagataagaatcttcatgtgactctttctcttgggatattacaccaccactatcagtccagttaaaaatgaagaaggtttttattataattctgtaacctgttgcaaaatctaatagggtagaaaattattagtagtttgggagtttagaagtagggtcaatatcctaaaaagcttaaatatcataacttaaaaatcagccttgaatatgctttgttaagggcttagtatttactcgtgtacaggacttttgctttattccaaaatgttactttcacattctgcaaatataccggtttcaaaatttccaaatccatgtttcacatacaaattgctgcagtaattttcccaggtcagcataaaatttgttcctgctggcccacatttggaaagatgatctatgggaaaacaaatgatctggctgacatttcttttctttcttttctcttattttcatgagtttgcatttgcagtacttctctcaaggtaatttctaatgcgattggaccctcagccaaagtgagctctggttagggatctcaaatattacatacatagcattagtattgcattgcaaaggattaaaaagtaatataataaggcttcaatctctcttttttttcacttcagctkttattaaatgtacaaaagaaatatcatgtgttttaccctctataatccaaattgtccccaacctggccttccatacggtagaagaaataatgatggaaatgcaaaatgcagtaaaaatgtgaaattgcctttctgatgagggttcagctatcaagtaatttttagctctgaaattttggtaacttgagtaataacctggatatctatattcttcagacagggaacgttagttggaaaagagtcactgggggatagctagggaggacttcggacagataagttactgtgattaagttagatgaaggaagtcttttgttttcagatagaagagagtttgaaattgacaaatctgttgcctttaataggtggaaaagacaagtttctcaatgtctggttgcacttcactgagctttcaaccatctccatcaagaagtaaatrtgagagctctgagttggttctactttctccagttttcttccattagaagaggtgtaggtttaagggtagtcatgagagttaacaacaataatagtagatagtatgtagtgagccctgagtacactactctaaaacctttacctctatgaatttattgaacctttccaaaagccctcatagtaggaactattatcaccccaatgttagatatcagaaaaattagtacagacattttacacacaaggtcatatagttagtaaacagtggaggcaagttgtggactcagtctggttccagcatctgttggctcggtcactttacctcctcccttttcaaagaggcttcaaactggactctgtgttggtatttgtttcccaaactgatattgatgttgtctttatttcttcattcttctctgactttaaataaatatttgataggctatattctttcgaacataaagtagggatctttcaattctgtcctcactctgcatgaatctgggcacatcactcaacaggtggcatcattttctttcttcaagaggacataactagataactagacaggaagaataattatgctgatttctcatgaaaatataaatagttggtattcagtacttcatgtggaagaaataatatttcaagacaattttttactgatgaatgtctatattaggaaaaaaatgtaaattttaggctattttaaataaattcaattaggtggatgtaagaagagtgacaacaataataccttcaccttaaatttttctatattttaccatgctttaaagtattgtcataacctgtaccaatcgccctggaaattaggtaacaaaattattactattgccattttttgaagcacaaaatcaggtataaaagcatttcctgcccatcccctgttgaacacttctccaaatgctccgtgtgtgttaaacatctgatgtttccactagatttcaagctcctcgaagacaaggaatgcttctcctttcttcagctacatccccagtttctggcagagttcttgacaaatagcaaatatttaacaaatacattcaaccagtgaataacaagagaaggctagtgacttgctttgatgaaaacagctgacagcataattcagggcttttcccttaggttggggggatatattataaactttgtaataaatataactttgtaatatctaattataatagcaatcataaataattaagcttgaaacctttacatgttggccctgggcaagaattcagtgtgataagcatttgttcattctaacttttgccccagctctctcttctcttcctggtgaatgtctatcgattcatcaaatccctaaatgggttatcatctctgcaaagctttctcttctccagacagttatttcctctgtacccatgttcccacattacttgccactaaactttctcattgtttttgttgcactgtattgtcattattttttggtaagactgccttcttcactagactgaaaagatcctacagggcagggcattgtgtcatccctggtgcctggsacgctgcatgtattatcaggaagggatctgaagcatcaaattcagctggaatgagcacacattccaaattcacaggattacctgattgagctttttgtgtggctttattattagcatgttgatattatcggtgttggcgccaagtcctatttcactattttagacccaataaatatgtttggtgttggtgttcccaaactctttcttttccctgagcctgttgcctatatatgtgttgagtttaaaaggtgtttactgaaaaagtagttataataagctaatcataatagctatggtttggggtaatgtattgtgctaaatgctttatatacatgtccacatttagtcttcataataaacctaataggtagatattataatattgaccccaaggcagtaaaggctttaccttggaccaaattattattgtgccatttcaacagatacccaaaagacagtttatttggtatttactgtactctccactccacctctgattcacaaattattaaaaatataacacccatattctgtcaaaagaggggaaataaatggcaatagtttaaaaaataagctcagctttgaaccatagctccttccaacaggggccctagattacacycctgstgtattagtacttactttttaaatgtaggtgggcattcctttctggtgctggtaaattggagaaacaagtgggtggaattcacatttctccccagttgggatctagagtctgattgttagtgatactcagagctcttcagggtgctgcctccagagtgagcagtctcctgggtgagcttcaaataacagaacagccagatgacccatcacmaacgcaccaggcctctggcccaagggtgcttatagaaaagtaccctaaataaaattaaaaaaaaaaagaaaagtccaggttaggacattgtatatgttagaatttggtagaatggatatgaactaagtaactgaattaaagaatgtgaatccttttcttttgatgccaaatgtcatatctcctccactaaaattgttattccttcagagttacagcatgttatttgtaaaaactgctaatttgaaattgtgctttgttatagtgcatctacacacaggttagtaaggcagtcactagacattattaaaaaggggtacagaaattctgtggctctgtgcctccagattctacctgattgatacttcactaccaatgcccaaaggcaaaacacaggccattcaaaaagtgttttttactttattccttacctctagcagtgggtttatctagggctgagaagccttaaggtaaagtcgcccttgggcagcattgtcttgttatgcagtgattctcaacccttgttgcatatgggacatagtggggaattttcagaactacagaaaacctgggtatatctctagaataattaaatcataatctctggggagggagtgccattttttatgtttttaaacagattctcatgtgcagccaaggttaagacccacctgtctgacaggaactggtttatgtaaacaatgccaacaaaaataggcatgcctatttatttcagtctattaccttgccatttccaccatttttttcttttattagttaaggcaatatgaatttcacaaccacaactactaccaccaccaatttgaatttcacaaccacagctaccaccaccaccactattatatattaggctccagtggtgcaactaggtattaatatatatcttaagagagaacaacacttcaagaatactattatgagaacccccaataatgaggaaattgaaactcagagaagtaatgatctcacagctactatgcaatggaatagagacctcaaagcctgaatcccccacttacgatccttagcagttataggttcctttgaggttggggacctagcttagaagttgttggatttcccttagccttaaactactcagaaatatttgaagatactcttcaattttttattcatctggatagaatgtactgttcttccacgtagctctccttcaatcatgctgatcccactgcttatatcctcaaccattccctatttcccatctctctcatggagccataatgctttctacttgattgcaagagtggccctttaacactagccccatacttttgattttattttggtatctttcagttttgcacctacctcctaacatatgctaattaccctgaagttatgtcatggccaagcatcagtgattttgtttccctgcaatgaagcaagaagagtgccgacattagagtcaggagatacctgtttcagtcctgattctactgtttactggccaggtgtccttgagatattactcgagatctttgagcctgtgcccttactggtaaaactgatctgtaaaatggatcagartacctacttttctggagatatatgcattaagttttctggtatatggcctgattcatagactctaggtaagtatgtagtatcttttttctctctttctgacctcttacatctctgtatgagaagttatacttaaccagcacaatgattgctactaagatgttgcatcaccactgacatttgtctagtgatcacttatttccctagaggagatttgaattcaatttaaaaaaatacagtgcatgcagacctaggcgttatgtgtctgtccagtaaaagactggggcagtgtggacagtagaactcagagattaaggcaactggtggggttttgtgttaaaagcaattttagattattggctgagaaatactcctggtgtgcctgcattcttcaatattgccttctttagatactaccaattagcaaataaaccagactctcctgcaaaatacttcattactttttctctacgttttctctgtgaccatatttctggctgtgtttacttactgggtgactttctgtaattgggttcaaacagttcagcaaacatactagtccccatgcacacacaagcctaatctctaagtaaccagtgtggctcttagatggacgtatggccaggagatttactgatactgaagaaattaaagtcgtcatgattatttttctgtactttattttctggagagcaaaaaagcaaaactattcacatgttgctaaaatctagcttgtaatcttcaggtctaagaagtacatgtagcaacaatgctctatgagtaaaaataagactcttttctaaaggggattattttaatgagggctacttccatggggagatgctggaattccaggttccagaattcagctctgcttcctaagggatgatcttgatagaccaaggaaaggacaccacagagtccagactccttcttaaattggaaaaagtgtatatcattgcatcaaagggaggtgagatgttgacataagacttgtgccaaaatggaactgaaagcaggagagatcaccgtcttaaaattctctgctctaggattttcttaaaaataaagagaaaaaatagatgaacaaataccaataagcatttgttgaatatccactgcatcaactataagaataaaaagttgcaagtaattaacctttctagatctcagctttaactataagatggaaatgatgaacacggtctacttcaaaatgttatgttgaggatatgacgaaataatggttataatagttgctggcacattaatgcttcataagtgtaggcccccttcatcctattacttttgcttttaacacagttccaacaagttttataatttagatgatcagcccgtaaccctccatcccttcagcttgatagaagtacaaagagaaggctagggaaataagtaatagctgaaacagtgtcgtgatacagaggagaaaagaaacgctaaaaccctttataatatgtaaatgtacatgctcaagatatagagctcttgaatatttaatgaaataaatgaaaataaaccattatagtctgtgcagacatcactgtaatgtaatttattacaataagagatgtttgttatgaatgatcccagtgagcaaatccacatttatgactagtaaaatgataactactactacatgttaaggattatcatgtattatttaattttcatatgtgtacttcaaagtatgtattaccactttattttattattattattattgttattttgagatgaagtctcactctgtcacccaggctggagtgcagtggcgccatcttggctcactgcaacctctgcctcctggactcaagcgattctcctgcctcagcctcccgtgtagctgggattacaggtgactgccaccacaccaactaatttttttgtatttcagcatgttagccaggttggtcttgatctcctgacttcgtgatactcccgccttggcctcccaaagtgctgggattacaggcttgagccaccgtgcccggactaatatcaccactttatatgtgaagaaacggaggctcatagttgttaaggaactttttaaggttacaaagggattagctaggacaattttaaactatttggaaaattaatttattggaaactcctcttttttatgtcccagaaaaaaaaataagttataaaatattaagctaagttttagatccagttaggtataaacattttcagagaagagagtgaacaagttgccttctaagaatagagttcatcaaggaaataggcttggggttggaatctcggtagatgttaaagaaaagagagcatgttagttgggtaaacgtctgtggacaattgcacgaaggtggagttagattcatgtgggtgctggcttygaactgtacagatttgatacctgtctcaaactgtgcttccaaataatgatttgtgaattaacaaataaatatctctcttatttttttttggtaccaagttgtatgctaagcattgtgatacttcactagacctatactttcaatgagttttatattttcatatttccaagtgtcttaataaagtttacttctctttttgtttgatctttctgtcttccatccatgacaagctgccatattggttttgttaaattgccagctctcagtgaaatccatagtcactgtgctataatgatattttgtaaagcactgtttcttccttaatagtggtatgttggagagaaactttccttcatttctaggatcttacttctgttgtggattctgcctaataaattcttatttaagtcagtgaacagggtaattgcccccaagcctcagaggctattaacaaggataagaagatacaaggaatatgtaagtttaagaccactatcagagatgggagacctagtcagaggtaccaaattatatagtcatttagactatttttttctacaaattctactgagaagagtatttattatgtgaaaaaaatcttaacaatatattaaatgtgaaagcagattaaaaataagaagtagaatctgatagtactttttgcagaaaaaaatatatacacatagaaaaagtctaggaagacaataaaaaatattaaaaattgtcatctctaacaatggagatatgagtaatttttctctttgcttatgtgaattttctaacttttctacaatgaatatgataattacaacaatcctagtaatgacatccaactcttattgagtgtacactattgagctaagtacataggctctgctctggggttgaaccacgtgaacttggatcctgggttctcttttattagctgtgttaagaagtaggccagatacctcatatgtatgacctcacaacatctctatggggtagatactgcatctacccrtagcccataacgtaattttatacattaaaaaactgaagcttgtagagttgaataaacttacccatgttcacatagaatgtgcacatataaaacacataataaaagtgaaagttatcctgataaagaatgtcagactcaatcatgttaattacaataaaatctcacaaatgaaattctgtcaagattatacatacatatatgcatatatttgtgtagtgtgtatataggagtgagggaagagggagagaaggcatccccttggattgagtttagaaattgataggtatgaggataagagcaagaatactcaatttgtagagattccactcagcaaattcatcaagcttatctttttctcctctgtttctgctatagtcagccatgttctgcatcccttgaacccagaagaggtacatagccacagacctactttagagtgggaagactggctgttttcctagacttggctcccggggagccatgctggccatttaatgtggttgctggcttgtggcttagtactagagatgatggcccaccagaggaagagagcttgtgagagccaagaaaatgggtcaaacataggaagccaggaaaggaagttaatccatgtgactagcatgaggctctgtggtcttggtaaagggaatctctaagtgaggccaaactgtgagttggaagtaagggaggaatactttatgagtcaatagtcattccctgagtaggagctcttttatggcatgacaagcaaacatgaagttctgtgagcattgaaaatkgttgggaggaacagaattaaatcaagtccaaaagacactgggcttgcagtagaagattggggaacagggagagatgaagctagagaaattaaatagttatccattaggaagctataacagctatcctccagttgtgatagcatttaaccagattatttattttctctggttttactttttaacatctcctaatttatgttggggaatttgaattacccattaggcaaactaagcgtgcactcagagaagtggcaaagcatgggcccccccaaaatgagaaaagttcctattggtaaatacatcaaaatttcacaatcagaaaaatcttgaaagaagctatttgaattgctacatgaatatggatatgcatgttatgctgtgaattaaaataataaaaatttatgttgaattatattggtggggctagtatcttttcaggggttgaggtgattaaatttcttaatccagccctgtaaataccatagactgaaagtcattttcatcataatcatcatcgatattaccctaaaatttgagcccttgcaatgtactagataggcatggtgccaagttcatgacaatcattacctaatttaattcttacaactatcctaagaggtaaacatcattatcctcatatcacagatgaagttagatgaggctgaaagaggttaagtgacttgcctgaggtcccacagctgattgatgatgcagctgagatgcaaatcaatttctccttcctcagagcttttgtgtactccatgagtgaaaaaggtgatattgctagcagtgtaggtagtaatgacataaaacacccgtaaactgttggaaaacgtaaatcatcagcatgtatatattactttacaagggtcacctcagttttgatgtctgatccagaattccttggagatcaatcagtattgtcaacctacttgctcaaatattgtagcagttcccacttggggcatgaccttactatcaaaatcagagagtcgttgtgttttgtttttaagattatcctccagcacaatgttgttaccagtgccagcaatggtataaacttctttgtattacttctgaagccatgttaaaatggttgtctaccttttcctccctccctcccttcctccctctgttccttcattccttcccttccttcattccttcccttccttcattcctttcctttcccttcccttccccttccttcctttttttttttttttttttgctttctttattgcttgctttcttgctttattcttttttgtagtaaaggactttaattaaaatataaggatttgacttagttctggatggcatcagtttttaaatagtattaaatcatatatttttgaggctgcaaattttagctatttgcattttggaatgtatttcttcctgtagagctgtatatattacaggttgtaaattaatttaacatattctgattttatttgccaagttgatctagagtggaatagattttactttcatagacatcagctttctcagccgaaatgtcactttctcaaggaacccatccctaaaacctctcttatatacccccatagcctctaacacttcccttttattcatgctatcaaagttgtagttaaattattatctctgaggttatttattcaaggtcgttcccattagtctgaaatcaccatcagggcagggacaatatctagctgatacaatgctgtaaactgaggccttttgaaggcaaagcactggattatagtaggtatgcaattaatatttgttgaacaaatgaatacacccaaattgttttcctatatttagttcttagctttatgaacagacaggtttcaactttgcgtagtttgctacctttgagaattgaaaatgccaaaaagtgacattacctttcaaagctaatggagaccctgagaaaacttgtaatatgtcacttgaaactcagaaaagtggttaaacaaacacctctatatctgctagtgggtaaggatggcaattaagtaacttgaaagaattagcaaaatgcacaggagtgtcccctaaaacctccaaacttgcatggtccctcatacaggccagacctcagaagttctgggatgtatttctggaaaaagatgagcattagtttcataaaactcaaatatttcaacattttgacaatagctttcctttatcctgactgcatttgattgcaggagactgaaacataagattggcatactcttataaaagaaggtttttgagaataattctcattttgaatgttgatttaatgaaggtcttagagtttgttgctctgataaattctgcttaatatttgcatattatgaggatgtgcccagcctacagcatatgtagaagtgtctctcccctctacaggcaggccctatagtttggtagcagatacctcaccctctggcctaccacctctgacacatgacactcacgtcttcaacttagtttcatttcttcgaaccctactattttttcaaaaagtgtcattgtatttgtgacaataatattctcaggcamttgtaagcattaaataatttgtctaagaccttatatccttagaataaattaattcccagtatgagtgatactaggattaaaggagatctgaacactttggagtcatagaactgattttcagagaactgaaatgtaaaactgaacatagactttatcatcactatggctgtcttttttttggccagagacaaagctgttttattgtgaatactgttcttctgtggatttcttcattcgcagttaaggagcttggctttaagaaaaaagtgtaaacagctttttaaattttctgtaatttgaatgtacctggcagcttcaaaagttattgcagactagaattgattgctttagattgcttttgaaaaggggccagctcttttctgatccagtagaagcatacagcagagatcagtaatgtaacaaaaaagaaactgtggattgaatgccaaatcagtcatggaccaaacccaatggttgacgtggtcctagatcgtaagagcacatattttagtcagaacctaatttaaagcaaaagcagttgtatttttacttgttagggagctatttggaatgcagatgtttaacagcacaatttcattttcagaaacatttctctttgtttggtgccatcaaaatttagcaacgcaatttccaaaagacctttcattggaccaaggcagcagaggactatcagtcctttcaatttatccttatagcactctttataaagcaacagggactttgcatgtgaacagcaaaaaggcaatggatagggaaagtcatgaggatgtctgaaaagtgggctagaacatgagtggtaggtataaatgacatccaggtgtataaagctcctactcatccactcaactgaattctactgggtctcaacaagagtctgtattgtagctgtgtaattragacttattgaatactccctcttgaatggcctgggtgctttctggaactgaaaggggggctgcctgccatggcacagtaaccataccagtggagaaggatatgggcattgcatcaaggtcctctttaggttgtgttgactttaatttgttccaagtggaacgaggtgctgtttctgatgtgctgcctacctcatagacaaagaccacctaatagattggatgcaaataggcagtaagttttcccattgccctataaacttcctacacattagctgtttaaagaaggacaagcggccaggcgcggtggctcacgcctttaatcccagcactttgggatgccggggttacagtgagccgagattgtgccactgcactccagcctgagcaacagagcgagactgtctcaaaaaaaaaaaaaaaaaaaaaagccaggcgcggkggctcacacctgtaatcccagcactttgggaggctgaggcggttggatcacgaggtcaggagatggagaccatcctggctaacacggtgaaaccccgtctctactaaaagtacaaaaattagccgggcgtggtggcgggcgcctgtagtcccagctactctagaggctgaggcaggagaatggcgtgaacccgggaggcggagcttgcagtgagccaagatcgcgccactgcattccagcctgggcgatagagcgagactctgtctcagaaaaagaaaaaaaaaaaaaaaaaggacaagcaaagcggttgtcttcaattggaagttgtagacaagagaggaaaaaatatcagataattgattttcagcttttctttactaacggatgattgtttaggaaattgcacataaagtgatgcataccctttgctgtacaaattacaccaaaggaacatattctgaggatgaaataaatgacctttctgcagaaaagaaaatattttattgttggttgtgtcctaataaatttgcaccaggtgaaacctctcagatgtgtttttcagtgtcagttcctgggctccgacttggatgtctcggacccaacaccaatttttcagaaaycaattcacaggtagtttgcaatttatgttttattggcttatgcgtgagatctgaaataaagaagatttctttgaaaggtctcacgaaggcactttggcacttgagtgtataataccacatttcatttagcccagcaggcctaaatgaatactcactatcagatggtgaaaaactccaccccgatgtaattgacaactgcatttctgcttggccttctcaccaacatggggattttataaaattagaatttgtttcccaccaccacccacccggccgccccacctctcccactgcccacctcccctgccgacccacctcctccatcaagtttgactcagagattaatatttaaagtacttacatcaccaaaagaaaggtagaagtttcatttgtattacttttatttatttatttattttatttattttttwtttttgagataagtaacatggtgaagtgggaagcatcaggatttggaatctgactgacctaaatttgaattgcagctttgctatttaatagctgcatgaccttgagcaattacttagtttctctgaacctcaatttctttaccccagaaatgggaataataacattgggactttcaggactattacaaaaattacttctaattctgtaagtttcttggcacattaatagtagatgatcaataaatggtagctccagctgctatgattgaagctgttccacagccagaagaaatggagtatacataaattcaaacctcttgcttgtggctgcaagaaactgcagatgcttctggacttgtatgagaaaatataattaaggcaaaaattttatattcatttaagcctttcaagtttagaaaaccatttccatcagacctctcaaaatcgtgatcagtcctttccttaggatctgtaaataagaacagagaaggcaaatgcaaattttgtgctgacaccaaacttaaaaacctatgttctaggttcactaaatgcacctcaacttttgcccagtttttgatggcaaagagagtgacaagatgtcatatattcatacctagaaatgaaataaggggaatgtactgagcaggaaagcaggatgaaatagtgtaaaaatctgggactgaacactgaggtttgaattctggtttcaacaatatcacttaccagctgtttgaccttagacacattgtttcatggtaatggaccttagttttytcccctgctctgcctaccatatggggctattgtgaagatgtagagaaatgaaggctataacagtattttcaaaaaaccaaagtcttacacaaaaatgagatgtcattttgcacaggttttcctgtatggctccaatgttatatggaccttaatttattcctggtgtcactcctgctaatgctgtgaccatgggaaaactacagaatctttctaaacctatttctatatcttaaattgtcacctcaatgtttactatatatggttactgggataaaatgagtacatatgcttgagacactttgtaagtagtcaatatastgtagatatgttggtgatggtggtgatcttatttagcaactagcccagaagcagaaagccttgcccaaaatataatttgagaaaataagtttaggaccaatatggaatcctgacattcagttgaaataaactgacctttattgagtctctgttcataagcactacagaatttttaaatgtcagcctctggaaattacaatggaaatagggagagggatgacaatagacagacaggtaaatgcataaatagacattgttgagcataattatgtgccaggtaatgtgctaagtacttcacagaaatgagcttatgttattttcacaacaattctatgagattggtktgaaagcttattttataaatgaggaaacagaggcacagagaggttaagtgacttgcccaagttcatagctaataatggtcagagttggtttgggaacccagaagttttactctgaagttyataccttgtccattatgaccaggaaaaatgaggtgcgtaaatgttatacaaagctttatcacattatacacaaacatagaaaacagtgtttcagaagagaagcaaaggccattggccttcaaatatttatgcaacaatgaaaatgttctcagcccttaaatgagcacttgtgacttgtccaaagtgagataactagtcaatggaagagttcaaactagagcatgtatcttagtctgttctcatattgctataaagractgcctaagactgggtaatttataaaggaaacaagcttaattgactcacagttctgtatggctggggaggcctcagtaaactgataatcatggcagaagaggaagcaagcattcccttcttcacatggcagcaggagagaggaatgctaagcaaagtgggaaactcctttataaaactatcagatctcatgagaactcacacactatcacagggacagtatgaaagtagctgcccccatgattcagttaccccccaccaggtccctcccacgacatgtgaggattatgggaactacaattcaagawgagatttggtggagacatagccaaaccatatcagcatgtttcctaaaccaaagtcccacattttccaagttcaattcaagtatttactgagaaataataattatattgtgaaataatgggaaagaaagagtgagtttacaaataaaggatagttcttgcctttgaagagcttacgatctagtaataagaaggacagttgtgcccacatgtaattatataactcaccttaatgggacaagttcaatagcaagggatatcctgcatgttgtttctgtacatctcaatttaatcactgagcacacttgtttattcaaagtctttctgccctgcaagaattctacctggtctaaagttcactacatcatccttagcatagttcctgatagaaactaggcactcagtaaacatatattgaataaaatgcataaatacaaaagcaaaatgatataagcccagaggagaagatggttaattaaatgtgaattggaaatgtactggctaaagcacagccagctaggataaactttaccaaaatgttaggtctctaaggaaaagagatcatttagatgaaagaggacctgtaatttatattagtccataccctgcctttaggccaatttgtagatgaattacactggcaagtcagactctggtttatttttaacccagacttttttttttaaccgtttgataaatttagaaaatatctattacaagttattcatttgaaaaataagaacttgcaaaatttaaactgaagaaaaactgattccattttatgattgcattacaaattctggttatgacagctccaaaagccaggcactctacttcaaggaggcctcagtggtgtgtccaagactgtcccagagtaaaagaaatgtccatttatatttacttgattttggttttgtgtattaaaccctactatgtgttttaattatctttttaaagagatgtatttcctcagtttgtgaccattccctccttcctttcctttcttcttcttgcccacccttccttccttccttccttctagcttccttccaacttccttccttcctcctttttttcctcttcacttccccccttgcttttttcagttatgactcattaccataatgttatttttacccatatcattattcatacattttctccctcataaaacagtgcagtgggcaagggatagcacatgctatgccctttctagggcctccacactctcctacactaccttttctgcttttggcaaccaggaaagagtcagtagaggatctagaacgggaagagttgggggaagagacacttggaaacaatacacccaggatgttacacgtattagtctcccaaaagtctaatcaaaagccatcctatcatttaaatcaatacaattgaataaattaactttcaagatgatgcaagctttggacaagagcatatttatgcctcattcacaaagctcagggtttagtactacagttactgtgttaagaactaaggaacttaaaagacaaaagtataaaaataaccataagtaaaaaataagttaatggacacataatataaaaagacgtaatttgtaaaatcaaaaacataaagttcttatgtggggggaagagtaaaagagtagagtatttgtatgcaattgaagttaagttattatcagcttaaaatagattattataactgcaagatgtcttatgtaagcttcatggtaaccacaaaactatagctatagaagatatgcaaaagaaaatgagaaagaaatcaaaagcaacaagagagaaaaacagggacaaaaaagattcaaaacagaaaactattaacaaaatggctataataagtccttccttatcaatatataattactttaaatgtaaatggattaaactttgcaatcaaaagatagaatagctaagtggattttaaaaataagattctcagctgggcacggtgtctcacaactgcaatcccagcactttgggaggccaaggcgggtggatcacatgaagtcaggagttcgagacctgcctggccaacatggtgaaacctgtctctacttaaaatacaaaaattagccgggcatggtggtgtgtgcctgtaatccctgctaccaggaggcagaggttgaagtgagccgagattgcaccaccgcactccagtctgggtgacagagagagactccatctcaaaaaaaaaaaaaaaaaaaaaagattctcattatatgttgtctataagacttacattaacttagtgacatacattggctgaaagtctgaaagtgaaaggatagaaaaatataatccaggaaaatggtaataaactataggtaaaaaatgttaaaaaatataaagaaggatattatataatgatagaagggtcaattcaggaaaatataacagtgttaaatatatattcacctaacatcagagcacccaaatatataaaacagacattgatagaattaaagaaaaatacagagcaagtcaatattattaggggattgtaatactcttctttcaataatggacagagtatccagacagaggattgataaggaaacagaggacttgaatgacattatagatgaaaaggacctaacatatacagaacatgccagctaacagcaggagaatatgcattattctgaagcgcacatggaacattttccaggatagatgacatattaggtctcaaaacaactcttaaccaatttaagaagatggaatcatgccaaatatattttccaactacaatgaaataaaactagaaattaatggctgaagagaaattggaaaatttacacatgaggaaattaaacaactcactcttaaccaataggtcaaagaagaaatcaaaacggaaatcagaaaatgtcttgagacaaatggaaataaaagcacagcataccaaaacttatgggataccataaaaacagtactaaaagtaaagtttgtattaatatacacttccatttaaaaggaagaaagatctcaaataaacaacctaattctacatttcaagaaactggaaaaaggaagacaaactaagcacaaagttagcagaaggaagaaaataattagagaaaaaaataaagaataaaattaaaagaaaaaaatcattgaaactaagagttacatattttaaaacatcaacaaaattggtaaagctttagctagattaaccaataaaaaaagagaaggctcaaatagctaaaattttttaaaatgaaagaagttatgttactactggttatatggaaataaaaaggactataagaatactgggaacacttgtatgaaaagttagacaacctagatgaaatgaacaaattcctagaaacatataaccttccaaaactgaatcataaataaaaaatttatatagacctataaacaataagcagattaaattagtaatcaaaagcttccccacaaaggaaagcctaggaccagattgcttcactggtaaattctaccaaacacttaaagaataattaatggcaatctttctcaaactcttccaaaatattgaagaggaaggaacaattcaaaactcattttataaggctagcattaccctgatgctaaagctagaaaaaaaatcacagaaatactactgcacaccaatatcgtcaatgaatatagatgcaaaaattctcaacaaaataatagcaaatgaaatttaacagcacattgaaaagatcatataccatggccaaatggaatttatttctgagatgcaagaatggttcaacatacgaaatttaatcaattggataaatcacattaaaagaatgaaatataaaaataatgcaattatatcaatagatgcagaaaaagcagttgacaaaattgacacatttatttcatttcaaaaaaataagtgggagttgaacaaagagaacacatggacacagaaaggggaacatcacataccagggcctattggagggtgagggggttgggggaggaatagcattagagaaatacctaatgtaaatgacgagttgatgggtgcagcaaaccaacatggcacacgtatacctatgtaaaaaaccttcaccttgtgcacatgtgccctagaacttaaagtataataattaaatttaaaaaaaacctcaacaaattaggaatagaagaaaattaccttacaatataaaaatcagatatgaaaagtcctaagctaaacaccatactcaatggtgaaaaactgaaagcttttcctctaaaattaggaacaaggatgttcactctcaccattctactcaacatagtactggaagtaacagccagagtaggtaggcaagaaaaagaaaagaaacctcaattggaaaggaagaagtaaaattatatttgttcacagataatatgatcttataggtagaaaattctgaagattgcacacacaaaaaatctggaacttaatttaaaaattcaacaaaattataggatacaaaatcaatatacaaaaattagttgtgtttctatacactaacagtaaaatatatgaaaggaaattaagaaagcaatcccatttacaatactatcaaaaagaataaaatattgaggaacacacttaacagaagaatgatttgttcactaaaaactaccaaatattgctgaaaggaattaaagacacaaataaatgtaaatgtgcatggattgaaagataatattgttaaaatgtccatattactcaaagtaagttacacattcaatgtaaccactatcaaaatctcgatggtatttgttacaggaaaatttaaaaaaaatcatatggaaccacaaaggaccccaaatagccaaaacaatcatgagaaagaagagtaaatctgaaaacttgatacctcctgatttaaaaatatattacaaagctacagtaatcaagacactatggcactaagctggacatacaaattaatgaaacagaatagagagcccagaaataaacccacacagataaaaatcaaatgatcttttacagaggtgccaagactacacatggggaaagaagagtctcttttaacaaataatgttgggaaacagaataatcatatgcaaaagaattaaattatcttataccacccacaaaaatcaactcaaaataaactaaagacctgaagataagacctaaaactataaaactcctggataaaaatataaagaaaatcctatacaacactggtctttactgcgatttcttggatatgacaacaaatgcacaggaaacagaaacaaaaatagacaagtggtactacctcagactaaaacacttctacagagcaaaagaaacgataaagagagtgaaaaggtaacctacacaatgggataaaatatttgcgaagtatatacttgataagggcttaatatccaaaatagataaggtactcctacaactcaatagccaaaaaacaaataatctgattaaaaatgggaaaggacctgaatgatatttttccaaagaagatacacaaatagccatttggtatatgaaaaaatgctcaacctcactaatcgtcttggaaacgtgaatttaaatcacaatgaggtatcacctcacacctgttagaatggccattatcaaaaaaaaaaaaaaaaaaaaggaaaaaagaaagcaaaaaaaatgttgttgaggatgtggagaaattggaagtcctgtgcattgttttggggaatgtaaaatggtacggttgctatgggaaacagtatgcaggttcccaaaaaatgaaaaatagagctaccatataattcaacaataccacttttgagtgtttattcaaaagaattgaaatcaagatctgaaatatagatttgtactctcatgttcattgagcattattcacaatagccaagaggtagaaacaacctaaatgtccattgatgaatgaatggataaacaaaatatgctatatacatacaacagaatattattcaaccataaaaaagaaggaaatcctatcatatgctacaacaagggtgaatcctaaagacaatatgctaagtggaatagtctatagaaggacaaatatggtattatgctgcttataagaagtatctgaactagtcaaactcaaagaaatagaaagtggaatggtggttgttaggggctgggggaggaggaaatggggttttgttgttcaatgggtgtagacttttaatcatgcatggtgaaaaagtggtagagatctgctttacaaccttgtgcttatagttaaaagcactatattggacacttaaaaatttaagagagtagatcttatgttttgtgttttttaccacaacttaaaaaaaaaactaaagaaaatacttgctatggataataattctgtttaatattttttaaatttgtgacttgattgcgagggaattagaggagatatttacatgccttcatattctttgaagcacacttttattatcttctgaaattatcggctgggcgtggtggctcactcctgtaatctcagcactttgggaggccaagacaggtagatcacttgagatcaggagttcgagaccagcctggccaacatggtgaaaccctgtctctgctacaaatacacaaattagctgggtgtagtggtgcatgcctgtaattccagctactcgggatgctgaggcaagagaattgccagaacctgggatgtggaggttgcagtgagctgagattttgccactgtactccagcctgggcaacagaataagactgtctcaaaaaaaaaaaaattcttgtgaaattattatgacttttggcttatattattttaaaattaatatgactttggagtttaggattctcttcatgttttaccactaactggcttttgacttagggaactgctccctcttttgtactatctagctataaagggagaactcttgaaaaagcttgagagaaatgcacagctgccaggaagtgcagcttttatgaattaatatcttgctaaaataaacagaagctgcttcagcttcagtgctaagaccactaggaaatttctttgaaaaatgagttcatacacttatgccactaatccatactaaatgttccactaaagtgctgactgtaggaacacattgccattttgtttttaaaatcaaaatgcttatttattgattttacactgagaagtagaacacagaccagaatacctatattgatgtgatcattgaaagatacttttgtcttcttccatgtttgatttatttcaattagggttaaacactttgtgctgagttcaaaggatgcagttgcaaataagagagctctttcattgccctactagcaaccacttactttctgtttggggaaaagggtacaaactaagttatagtgtaattcttgttttaaatacaattttgttaagtgttgtaatagagaagcacaggtgctaaatgagtgtttaatggaaagatgacatgagctatcttagaaggtgacccggtattcagggaatgctttcttgaggaggtgatgatatgcaagttgaactccaaaggacagggaagacaccagaatttctgagtaaaagagatctggatggcaatctggttggaagtaaagactagaagctttattttggagctgtgttgcatagtaatcccacttctttttagattatactgtatgtttatttasggtggctttgggggagttgcctcttgatgcagcctacagaagggtgagtaggaattaattatgtgaaagtatgaagtggggaaaagaacatcctccatggccacaaggtaggattgagctcaagtattcaaggcctgtatggttggaggacagagcaagagtgtgaggcacagacaagactggtaaaaagccacagaggccagatcacatgggtcatgattaaagaccatccaaactactttaaagattatastatcaatgaggataaagagtcccagaaaatgacgtttaactgacaggtatcaagcataaaggacctgatcataattgcattttaggaattactctgggtgctgtgtgagagagaattagagcaagggtgtatgcgagagaccagttagaaagctgtttcaccagttctacacagaaatgatgctgggttagacatcacagtggtcatcatggtgattgaaagaaatagataaatgttaaagatatttacacagacaagtatacaaatactgtagagcatgacttaatttgccaaggggatctgaaaagcttacagaagtgacattagtttaatcttgaaggatgagaacaaatttctgktagaagtatagtttagcacttagattcaattgcaaaaatatgcaaattttaagtgattattacctttttactagtgtttctttcagaatctttaagaaatattacataattaatgttctgatttctgtatttgtgatactaagtaccttagaatataatacatttacatttcctgaatacaattttataatttagacttgtaattaattcagattaaccccttccccatcaacactcacccaaatccarctatgctagttacaattcgggacattttaaaagttttttctaccttctattaaatcstctgttttggttaaatctttgcatcaattaagcatgttttcttccacactaaattcctgcttgtttttgtctcacaaaagttatgactaaattagtttaaatattttggaaataattttagagcctaaaatactttacgtattcctggctttcttattttgaaggaaatgtgcttggatctggagattatctaggccaaaggttattagatgtaaaagaatgcggatttcttagcatttataaatctctagtttttgcaatcataggaatagactgtacacacttttcaaagcattttatgattatttggcgtattacttgtggctgataaggatgtctgtcaccartcmctctttagcaatcacttagctctccttttattattaatattttcatttcccatatgcataattttatctggaaaaagattctgtatcaagttttagtgcagtacaatatatttatccatttttgctattttttattaaatcaagctaggatattagtcttaaaygcttgctttgaaactagtgattgttctatgaagycagtgccaggtcaaagagagttcaataagttatatctcatctaggcattgctctgtgcaccatctgcccatgttaaatcacagtgataagtaggatgtgtacttgtgcatcgctaattcttgtttggccagaatttcatgtcatctcatggtcattacaattgtccaattatagttgatcaaattggattaccattaattagtgagtctgtcttatagtacagagggctagttgaacatatttatctgtttaagtgggctgtcctcakaaagccaaatgtcatgtttgaaaagaaaagtcttgtttgtggggagggaaagataggagtatggaattactttacatgtactaaactgaaggagtgatttcaatatagtcttttagtaagcttaataaaagtttgctttagccttaaagatcttttaagcaaaataacattagttatacaatggatgctatttaactataaagaaatgacatgctaagttattaaaatagaaattctgtggcccttgtgatgggaagaaattgcgcattctgaacaacccattcataacagatttaagtctctgtgaagatttgtaatatcttgagtagtgtcaagccagaaaattgtttctgccttgctgcaagctgcacacaccattacaaagttgtgatggatgcacactgacttatgtctatgtagattgattcttatacttgagaggcaaatggatgagaaccggacatgtgttccctgaagatgccaatgggcccttgtgcaatgatatctgcctaaaaaactagagaagcatctatggttagataagattggagacagccaaacttatcactttccgacattctcatttgagagtgatggcattggcatattgcatcaaatcctactgtacagccatgcatcrtggttataccagaaaagcctaaagttctctagggttttcttcgacccaacagttctttcaggtataatctattgatctaaaataaaaaggggggagggagggaaagagagagagagagaaataattttctcccttttcgtcactgtcttcaggtattgattttaacttcttgatcttctttaagaaggcaaaaactattaatgcctttgttatttctgcccaacagttcaagtttcatatatttttgacaaatttccttaacaagaatacctcaacaccagaactaaatttaactttaaaggaatagtttatgtttctagaacattgctgaattaaatattattattttaaaaatgtgtatcaactccttcatttctctattttttccttccatttatacttccacccaaccatccattcatccgtcaaacatatgtatgtatttactgcctgttttgtggtggacggtgtgaaaggtgcttagagaaaaatggccattaacatagaccagaacctgccctctaaacttacatatctggccattattattgaacaaacgtgttttgaataccttctgtgatgggcacaatgctaatatcagccccttgtgcagaatttggaaaagtacccttatatggagatacatggacaaagaagatcctactccttactttcaagatttttaagtctaacagtgatttatccagggagtcttagtgttcaaatgtagaacttgctatgatctcagcccttgcaataagcaccttgccagctcaggcaaaaatcaggcctatactgccccagcacctggtcaatccactgagaaggtagatttgatggcatctgatggtctacagataaagtaattatttcataggattatataatctttgttaggtactgcatggatggtaactggctgcacacttaaaccaaaattatttccttagtaatgtgtgataaggatagacattttggaaatggatgtggaaagtttcaaacagaataaaaattattaatgttatggcaattagcctttcacttcactgaaaatactatgtatggattcagcaagcatgctaaaatttaacacaaaaatcctctttggaaggcaattgctttaagttagaaaaaattagctyatttttcagtgaaagaatttgaaaattctgtctttggaaaccaaaatactgtatggcagagttggatgcatctttcactttaaaacgcagactctatttgtggtgaatgtatttgttatggtaaagtatttgaaaggaaaccctcagaataatttggggtaaggaaaaatactgttttaaaataagcccaacccatcagttttaaaccttgaaaactgccttgctttgaataagaaagaattaataatcgtgtatagcataaagaatatatgtttggactaaaatgcataatcgtgatttaaaacaaacttccaaattttaagagactctagtataatggtgtgacctcaatgatttttccaaatgaatttatgttcttcagagttaatattgatgatcttatatagttacttcatgactgggtctgtgtcttggcaaatctctctctarataagtgattcttataaatgttgaaaattcctttacaggttaactttcccatcattttttattgcttatgctataaagtttaagcctagatgcatcctttctggaaagaagggtcctactaatctcataagaatctcataataagttctctttcttaaggtttgtattttgtgtggggatcggcaaggaaagggaaaagccggaatgccaaacagcaaagagttattctttactgtagggctccatccaaaaagggtttgtaacacagtgtacagtcttgtagcccagctgtgtggagcattgattgcttctgcctagagcagggatactgtcaagttgctctgtgagttgagtcatctattgacaaagagctaccagcccgcagataatgctgtgcggagctgctgtcgctgctcccactgctcccacgatgcactgcttatagcagctgtcaaagatactgaggaatccacggtggaaaaaagacttttacaactggctggaagaaaggggtgtgagggaggagacatttctgtgcagagctgaccaaaggaaagagtaggcatcagtgcagtatgaatgcatacctcaccaagcaacacagctgcagccgggggtccgatgggatggatgccgtcaggagtgcgcccaccctgatcagggatgcccactgtgcttgtggctggcagaggaactgtcaggggctcgggtacagttctcagaccatgccctcctcaggaccagggggcccagcttcaaacaggaccggggggtccagcttcaacaggaccttgtgggacagtgtgcggaaaagcccccacaagacgagcaccaagggcaaagggacttgtggggagcattgtacctgcccacatggttggttcagcccagcacaggtgagccttttccttatgactttcccttgagtgtctgaagaaagtgagagcaagttgtttaaggttagaatggcttggaaactttgcagagtaccacggktatgcctgtatgtaaaatattaggccaagaaaaacctgtcattttcacacatgtttgtgggctcatacctctggtggcctgtgaaagtctagggatgccgtgctcagtttatttcactgacttttcttcaacttctctagtcctcaggttatattattttttatcatagtcttttagcagcccttttacttctaatcatttttaacttttgttctgtcctgcctgtttattattatttttttaaagagcagagaaaaaataaattttaactaaactttccatctctttaaaggcaaaagaacatttgtttctttagctatagaaaacagtgatttgaagtatgctattctaattttactcttataatactgtatgccttttcagttatggagaagaacaattatttacactaaataattaattttacaaagaaaaggaataattatgagcaaaacagaggatggttaaactcagaataaaagaattaagcacttaatttattcatggagaagcaataagtttatatcaacatctatagctctctttcttctataacgcatttctaaagcagatgtgcagatacctttaatttgattcctaggttattctagcccccagactactatcattttatcagaaataaaattggctcatttttttctctcttcatttaaaggagagaaaataacttcctgcaaatgctgtaaaatataaataaaatacacctgtagtcactgtcatacagaacaatgactgtttaatatgtattgaagaaaagctgtatttgcagaaaaattcaatctcaattttaatatgattttagcatagtggagaagtagatattgatcataaataaaatgttatggtgacaggtgcagagaatattttaattttaataatagtttttaaaaagtacttccaagaatgtcatttatcactggtcttaataatatagttacatatgcatagccatatatatggcctttgattgatttgcatggaattataagctttgcttagagagatagagcatctcagcctcctgatttaaataaaaaatacattaccattttattattaaactggtttggcttaaaatagaagttgacatttagaaatgcagttattatttaaagttaacatgaattccaaactgaataaaaagtcttaacagttgtgaacactgtatatactctttaacaaatacattcatttaaatgtctttagcttatatctctgtattgattacattaaattctcaaggctcacataggctaggaagcaagcctacttaatagcatctagcttatggttgttgcacagagcagagaaagcaaacttgctttattgttgcaattattttaatccaagatgtaacatactttttatttcgtaaatggtaatttcccaaacccaaatctctaatactaggttataataagcaaactctaaaaatattcatattttttcatcaactgagggaaacttttatttccttagtttttaacaatgcctcctacttgtctgaaacttacagccatttaatgctttcaaggattgaaatagaccgtatactgataattagagatccagtgacatataagaaggcaacaaattgaggtagccaccatctctccttattcttttgcataagcatttctatacattttccctcccattcacatgtactgtattattggctgggactaatagtgatccacaaatactggagctatgaaaccatatcttttaggattttcaatgttttaacacttttcacttaccagaaccttccaccctttaccatttcagtcctataaaagtgctatgctaaattgattaatccatcttcaccaatgcttgaaaactttcaaatacattatgttaaataatttcaattgtctctacacatacatacacacagactttaatatatgtattcaaatgtctcactatacctaactacttatgtatattaacatattttatgtatatttaagtatatatatgcatatatatgcacacatataaaaattagagttctatattatttcaatttttctgtcctagagtatatcagcttgttcttccaaagaatgctgcattctatccatataaagtattttttcatgtaaattttatttcctttacttctagtaggtcctcaaaactactgatatatgtatatttatagatctgtttccatttatatatgcatccatagcatacatctaatatctaaattatatagagatgtgttagtactatacacttacgtatattatcacaaaaataagagcatgtgtgtacctatatgtattcatgtgtccactaaaactaaggctgttttgagaatttcatgatactactttttaccccttaaattaactgggaatatcctgtgaaatattgtaaaacctaaagctggaggctaatgatactaaacattagaatccttgataaagcgtaaagaagaatagtgcatgttttaaaatagttcagggactcacatgtggtacagaatgtgccagagagttgttaagcatctgggagcttggatcttgccctcggagatatttgcagtattacgtggaactcagcagtgtgatttccagctgctataacagagggccatagtaatgacttgagttcctcctaaggctcttttccaaactcctgttatttggggtactgtgtactaacaggactctgtcattatgttgttcctcagcaggtctgaaaatcagcttctgtccctctcaaataagttttcattccatttggatctgtagaattaatataaccataatcataggtaaggaaatagaaaattatagtgcccaaaagtgcgttccaaaatgtacatctaggatgttagtgtcagccttgggaagaaacatgtccatcattgtttatgtggcatttcttcccagtgcagactaatctagggaagcagcacagaacagtggagactcagagaccagagttttgtgcatttgtctttctttcttcctttcctttcgtatcctctttctttttctttctttctttctttctttctttctttctttctttctttctttttctctctttcctttctttttctttttccttctttccttccctccttccttccttcctttctctctctctctctcycctccctccctccctcccttccttccttcctttcttcctctctctctctgtctctctctctctttctttctttctttctttgactatcatgtactgaatgcctactatgtactattctgtcaggccttgtgtgtataatattatagtaaacaggctgagtgtggtgactcacgcctgtaatcccagcacttgggaggcagaggcaggtggatcactagaggccagaagttcaagaccagcctggccaacatagtgaaaccctgtccctactaaaaatacaaaaattagcccggcgtagtggtgcacaccatagtcccagctactcaggaggctgaggcacgagaattgcttgaacttaggaagtggaggttgcagtgagtcaaagtggtgacactgcactccagtctgagctacagagtgagacttggtctcaaaaaagaaaaaaaagaaaaaaattggccaggtgcagtgactcacgcctgtaatcccagcactttgggagctgaggcgggtggatcaggaggtcaagagattgagaccatcttggccaacatggtgaagccccgtctctactaaaaatacaaaaaaattggccgggcgtggtggcgggcacctgtagtcccagctactggggaggctgaggcaggagaatctcttgaacccaggaggtggaggttacagtgagccgagattgcaccattgcacttcagcctggtgacagagcaagactccatcttgaaaataatactactactaataataataaaaaataaaaaataaaattgtaaagaaagtagatatctctcctactactgtggagcttacagcctataatggcctataaaatttagcaaatgatatgccatgtataccatgatatacaaataattatatcatcgtaagtcacaacttagaagcgaagcaaaatttcagagagtgctgcagataaccacaatgaatgcatattcagaatacagaggaaccacagagaagttaaaaaattgaaatacttggaaaaaaatactgcatctctttaaacttttaagattttctgggttttttgttttgttttgttcgtttgtttgtgtgttttgagatgcagtctcgcactggtcctggaatgccatggtgccacctcatttcacttcaacctctgccgtccacgttcaagcaattctcctgcctcggtctcctgagtagttgggactacaggcacgcgccaccaggcctggctactttctttttttgtgtgtatttttattagagatggggtttcaccatattggccagtctggtctcaaactcctgacctgtgatctgcccgcctcagcctcccaaagtgttgggattacaagtgtgagccactgcgcccagccaagattttctgttttataaaatgaggatataaataacacctacctcagagagttgtggtgatgaatgattaacaaaatgttagcatagtgctttcatatggtagatgctcaattaatatttaaggaataaatgaatgagtaaacattggctattactaatctatttcttaatacattttttgattgggaagagaagagaaatgaatcagtgagggcttcatagaggtagtgatactttgacggaattaaattgaattaaaaatgttgtacgtgtttgttaagcagataaaaagagagaaatttttgagcagaaatgaaaaatacagaaaagcatgtaacaccttggtgcctgtgcacacagttctatttgcccggaacattgagccctgtgagagaaggttcattaaaagagatgcctggagaggagggtggggcctggtcagagatagccgggtggaccttgatgaggacttcataaagtttgagtgcctgctctgccactctttatgtgttatgcttcatcatcagttaaccctttgagcctcagtttctctgtttgtaagacagctggttttctagatgaacacccaaatctcatccagtactaatagtatgtgactgtgtcaactgacacttattaattattgggaagcactttggaaatgttttatgcttaaaagccagacaatctcaaatttgaatttactagctctgtgtgatgttatttgcttaacctctctaagcctcatttttctcctctgtaaaacttgggataataaattcatgttgcagggaaatgttataagaattgaaaatacggtatataaaaaccccagtatggcacttagaacacaattactcagtaaatggtatttattattgttaatgatatctaaagtatgttttttatcctgaagaacttactgtccaggaaattcatcattcatattgtgctctttcattagaatttatggattttccactgaattttttgatgtcttccttataatgatgaaggctaggctaggcaactgtccagaaacttttggcatagtaccacatgatgctgatactgaggtgacattatgtccttcaaggttctcagcaatttacaactgtgcatgctagaaaaaaaaatcatgtaaaatagaattgtgttgatgaagtagcattcccataagcttgtatttagaggtaaggaaatgctgaaagatttcctcagcaaaattctgcaagaacaactgtgttcgaaatatttagccaagctctgtaaatctcccctcatagttcctttgcagcaactccagaaccagcagtttgcagcaacttgagtgcggaggactttttagtccaagaagtagggttgccctaggatgaaatcttaggctcagtttatgctcagccagaatgatctgacagcttgttttaactcagcacctgctttgacttactcctcttagaaaggcagccccttaccaaggaagaataagactttcttgtctctgggaaatagcagctgtcccccaggtaagggaaacagaagagagcaagtgataacacagaaggaattaaaattgtaagtattcctgtggcagatgtgaagccgtttggtcaacactcctagcactcttattgctggatgctgacataagcagagcattctctctgggatagggcaaggagaggccaagcacacagaatgggaaagaaaagaacaaaaatgacaatatttattgcataatcaccatgttcacaatgtgtgagacactgtgctaggaaatgacattagtcatttccttcaattttcccaataacactaacagagtgatgttgttatctccattttgaagatgtaaatggaacctaagagtaatgcttatgatcacaccactgataagggtagcatgcatttcacatgcaggtgtgtatgacttccttattctctccaccgcgtcttgcaaaaataagaccttttgaagtatgctgggaggtaaaataccctaaggagacctctataaatctctaatttaacagaaatttccttaatgcattgggatgttctacatggttgggagtactggcattcccctgcagaatcctggattcccttagcctactttattttctggtctcaggaaccctgagtgagttgggtctctgaagatcgcttccctcctttattatggttaagaactatgtagatctgaagcagctggagttgattcccacagcacttaacaccagaataagatacttgctgtgtaacttgtaaattgaattcaagtttgcaacatttgtggtatttgggaaccacctattgtaaatttaatataaatacaaaataaaagtgcagagagacactgtctttagtacaagagcatcatctcacattgctgagtgtgaatctcatacaaacgttctatctccctatgtatccatcatgccaagaatcaaatctctgtttgataccaccttcttcatggtctatcctctttttctgatattatttgatctcttacaagtgtagcctcacctggttttattctcattcattctctactttgttccattcttttggttttctaaaggaatctagatgttttgtaattatatcagaactgtatggaatcttagtagtcacctagtacatgttccaaaggagaaactgtaccctagaaaagttaagagaattgctcagggtcatttcagtttgtggcagaattggtccatgtccttaaactcggaattaagttttccttttattgttataagttgccctccctctcctagcccttctgtgctcatatgtagagtcattattgtcagataattatgaggcatgcaatttattgataattaactgttggacattatacaaaaagttacataaacctgtttttttactcagaatttagaccagtgattcccaaggacagacggagagaggagagcccctagaaattattttttaatgtttttcttccaactttgattttaggctcggggggtgcatgtgcaggtttgttacatgagtaaattgtatgttcctggggtttggtgtacaaattacttcattaacctggtagtaatgagaggtgacagcgtgctggcagtcctcgcagcccttgcttgctctcggtgcctcctctgcctgggcacccactttggcggcacttgaggagcccttcagcccgccgctgcactgtgggagccgctttctgggctggccaaggccggagscggctccctcagcttgcagagaggtgtggagggagaggcgcgggcgggaactggggctgcgcgccatgcttgtgggccagcgtgagttccgggtgagcgtgggctctgcaggcccagcactcggagtggccagctggccctgccggcccgggcaatgacgggcttagcacccgggccagtggctgcggagggtgtactgggtcccccagcagtgccggcccaccggcgctgcgctcgatttctcacgggccttagctgcctccccgcggggcagggctcgggaccatgcctgagcctcccccactccgtgagctcctgtgcggccggagcctcccctaccagcgccgccccctgctccacggcacccagtcccattgaccgcccaagggctgaggagtgcgggcgcacggcgggggactggcaggcagctccacctgtggcccccgtgcgggatccactgggtgaagccagctgggctcctgactctggtggggacttggagaacctttatgtctagctaagggattgtaaatacaccaatgggcactatgtatctagctcaagctttgtaaacaccagtcagcaccctgtgtctagctcagggattgtgaatgcaccaatcgacactctgtatctagctactctggtggggacttggagaacctttgtgtccacactctgtatctagctaatctagtggggacctggagaacctttgtgtctagctcagggattgtaaacgcaccaatcagccccctgtcaaaacagaccactcggctctctgtaaaatgaaccaatcagcaggatgtgggtggggccagataagagaataaaagcaggctgctcccagagccagcagtggcaacctgctggggtctacttctgcgttgtgggggctttgttctttcgctctttgcaataaatcttgctgctgctcactctttgggtccacactgcctttgtgagctgtaacactcaccgcagaagtctgcaacttcactcctgaagccaggaagactacgaatccaccgggaggaacgaacaactccagacgcgccgccttaagagctgtaacactcaccgcgaaggtccgcagcttcactcctgagtcagcgagaccacgaaccccaccagaaggaagaaactccagacacctccgaacatcagaaggaacaaactccagacacgccgcctttaagaactgtaacactcaccgcgagggtccgcggcttctttttttttttttttttttttgagactgcgtctcgctctttcacccaggccggactgcagtggcgcgatctcggctcactgcaaggtctgcttcccgggttcacgccattctcctgcctcagggccctgagtagctgggactacaggcgcccttcactgcgcccggctaattttttgtagttttagtagagacagggtttcaccgtgttagccaggatggtctggatctcctgacttcgtgatccacccgccttggcctgcggcttcattcttgaagtcagtgagaccaagaacacaccagttctggacacagtaatataatattcaataggtggtttttcagtcctcaccttcttctcaccatccaccctcaagtaagtcctggtgtctattgttcccctttgtgttcatgagtactcaatatttagctcccatttataagtgacgacgtgcgatatttcattttctgttcctgtgttaatttgcttaggataatgacctccagctgcatctatgttgctgcaaaggacataatttcattctgttttatggctgcatagtgttccatgttatcaatgtacacattttctttatccattctaccgttggtggacacctaggttgattccatgtctttgctattgtgaaaagtgctgcaaagaacatacacgtgcatgtgtgtttatagtagaataatttataatttatattccttcgggtatatactcagtaatgggtttgttgggttgaatggtagttcttttttaagttctttgagaaatttccaatctgttttccaaagtggctgaactaatttgcactctcactgaagtgtataaacattcctttttctcaacaagctcgccaacatctgttattttttgacttttcaatagccattctgactggtgagaaagcacttcagaagagcagagaggtacttaagtgttgttaaagattggaagtgatactgggatttaggggaagagggtcagggatgctagacaccctgtgcagagtggtcttgccccacaaataattgccccatgtactgcacaatttttagcgttccactagacagtcatgaatattaacgaaaaaagtttattattatctaagcctaaaatcaaactcaattttacaaacaagtatttttgcaaggattcaatgattattacattttctgggactataactccgcgaaaatcaagggaccattacactttgttctgttagcaattttgtcagttgttccccattttggaagaccatatccttaaaacataatgctgattttagtattgacacacctctcctgcatcaatctatgtgtatagatttcatctgcaaatatgcaagtaaagagatttgagactcctgttaatagatttggaaccaaatattttaattttttggttcaagttttattttatttttaattgacaaataataatttatatatttatggggccctatgtgatgtttcaatgcatgtatacattgtgaaataattaaatcagagtaattaacatgtcagtcatctccaacatctattatttctttgtggtcatgtgaaaaaaacgtgtgaaatctattattttaactactttaaaatatacaaaacattatcattaaccttagtccctagtgaacagaaaaggagtgatgttggtcacaagatctagaatcaaatattttaacttgatagaaacataaaatacagggatctcaccaaatttcattaataaagttgtttttaaaatattttatttgattgccataccatacattaatctttaaagcactttaaagcataataagaaatctatttgtgcaaattacttgacatcatcaagtcagataataaaactctgttttagagttttctgttttttcaatattattctgatattgtgtcaaatctcaaactcaacttgtatcaaaactccacttccccataagcccttaggtttcagagtttatatctatcattcctcattacctatcaaaggatagaattttagagtgctagaaatcaaatatatgccttctcatgagaaggaattccaaacaggaataggtaggtaggtaggtagataaatagatagatagacagataactagctagatgactctcttactggcatgccctattttgacattaaacatatcagtaagacccagtttatctgcaagaatgacacatttttaacttactcctaccatctgcaattttccttgttaaattatctgtatttcagctactaaagttatttcctctgacgttttatcaaatacaaatggtctgctattactttttctaacactaatttttaacctagaatttattgtatatctgctgttttattttcctgtaccctttgtaaaatatggtatctggtctttttattccatttaaatccaaatttattctttataaatatatgcaggcatttcactatctcattacattgtctggcatagtaggactcacagactgccatattttcatttttgtagcatcattattaaattatgtttttgtgccaagacttatctgcattatggctgtggagaacaggaactatgtgttcaatgcctatatgtcttgcaggataacctgcactatgttttcaacacactattttaatataaactactttttttttatttcttcttttactttggtaaaggcactacattttaaaaaatatgtgtagtcagttgtatcatctatgaattttatttcagatgaaaaaaggaggacattacaaaacattatcaaatggaaaggttgaatctgatagaatggaaccatttgttgagatattcaatattgttttgtataccattatatctgtgtgtttagcttgccttccaactagtccaggagtcaccaaactacagccacaggccaaatccagcctgatacttcgttttgtgtagctccagagctaagaattatttttaatattgaagaaaatcaaaagaataatatttcagacatgaaaatcatgagtaattccaattatgctatctataaataaattttattagaacacagccatgcttatttgtttacatattgkctgtagctgtttttgtgctgcaatggcagagttgaatagttgtgatagaaactgtaaggctagaaagtcagaaaaatatttattatccaacccgttaaagaaacaagtttgctgacctctgtgctaggttatcggctttccatttcccacctgatggaatgtccctttctgcccaacaaagcctatccattttttaaaaagtctggattaagcacatcttcctctttaatcctttcatttgagctctcaaagttgctatttaacatgcgatcctgcaaaattagagtattgccttacatcgcggttagtttccttctcagtctccctgattagagagtgtgagattcctcgtattcccagaatgtagcctaactcacagtagcatagctgttcaatcttgtggcctctttgtgacaattcatgtagcatcattattaaattatgatttggggccaagacttatctgcatttatgactgtagagaagaggaactatgtgttcaatacctgtatgtcttgcaggataacctgcacaatttatcactttttaccatagtatggataagtattgatacttttcaatatgtttctgcgccattaacctgaatttccttagagcatgacctgtcttatttacctgtttccctagtgcttagcacgtaacagtaagttaataaagtgttcttgatttctgaatgtatattaatacagggccttgtatataaaggcactcaatcagtttgaatttattattattactgattatgcaggtgtcttaagatcaagaatgacaccttctattcccacagtagctcaacttaataacaagcatattattttaagtttacacagatttactgttttgtttcctttgtttatttgttttgtttttagtttaactcagattcttattcaattctgtggtgctattgaaatattggaatcattggttagaaattagattccatattcaagtgggtcatactatttcagtgatgaaaggtagagtactatagtttgagaggaaatcggacaaaaattttgatcttacacagtatcatagtttaacttaggagtcagttgttctctgtaaggttgaaataatgtcacgaaatacattttataattagtttctgtatactctgttgtagactacatgacctttttcttcatcattttcatcattaaatataagtgcttggagtacagtagttaccaccattgcataaaaaatctatgattgaacacatttgcattttattctgacaggctgcactattcagttagcagtcaacattgactgttacagttatggttattatagttagttatccatgacattcattgtccaaagctcagtttatatactagctctaaagttgattatgtttacacactgatttttcatttctctaatctattttactcaatctctataatacctgttatcatacttaattacaatttttaaaaatatgtttccaacttcaagttttgttttattttattttattttttgagacagagtctcactctgtcacccaggctgaagtgcagtggtgcaatctcagctctgccctcccaggttcaagcatttctcctgcctcagccttgtgagtacctggaactacaggcacacgccaccatggcaggctagtgtgtgtgtgtgtgtctgtctgtgtgtgtatttttttttgtttttggtgtagagacacgttttgaccacgttggccaagctggtttagaactcctgacctcaagtgatccaccttcctcggtctcccaaagtgctgagatttcaagcatgagccaccatgcctggcccacgttttattttttaataaaataaaaactagtagttaatcataaatccttttagtttaaaactgaatattttagctacttaaaaaacaatttgtattatttagtttaaatataatacaagcttatggtaaaaaatagtatgaattaattatttttaaaaaattaaaagtcacctgtaattccacctagagttaactacagttaatgtagtaacaactttttagtccttttatctgtctctgtatatgtatcttcagtgaaagatacaaattttattgacacgtgctcacagatctagctaaacttgagtctcatttatatatgtctgttaagtgagaagttaagaatataacttctttttaaaaattagcatcatgttgcaatgttttttaaaaattaacatcatattgtgaacatttttctaagttagaaaaatatttttcttgttgacatcattttttaaaattatacttctgggatacatgtgcagaacatgcaggtttgttacataggtatacgcgtgccatggtggtttgctgcacccatcaacccatcatctacattaggtatttctcttaatgctatccctcccctagcccctcaaccccagcaggcctcagtgtgcgatgttcccctccctgtgtccatgtgttctcattgttcagctcccacttatgagtgagaacatgtggcgtttggttttctgttcctgtgttagtttgctgagagtgatggtttccagcttcatccatgtccctgcaaaggatgtgaactcatccttttttatggctgcatagtattccctggtgtatgcgtgtcacattttctttatccagtctattattgacgggcatttgggttggttccaagtctttgctactgtgaatagtgttgcaataaacatatgtgtacatgtatctttatagtagaatgatctataatcctttgggtatatacccagtaatgggattgctgggtcaaatggtatttctggttctagatccttgaggaattgccatgctgtcttccaaaatggttgtactaattttcattcccaccaacagtgtaaaacagtgtaaaagtgttcctatttctccacatcctctccagcatctgtcgtttcttgactttttttttttttttttttttttttgagtctcgcctgtcacccaggctggagtgcagtggcrtgatctcggcttactgcaagctccacctcccgggttcacacccttctcctgcctcagcctcccgagtagctgggactataggcgccgccaccaggcctggctaatttttttttgtatttttagtagagatggggcttcaccatgttagccaggatggtctcgatctcctgacttcgtgatccacccacctcggcctcccaaagtgctgggattacaggcgtgagccaccgcactggcctgtttcctgactttaatgatcgccattctatctggcatgagatggtatctcattgtggttttgatttgcacttctctaatgaccagtgatgatgagcttttttcatgtttgttggctgcttgttgacatcttttttaatgactgccaaatattctttttctaccaaaacccataatgttgggcatgtaggttacctttctttaagttaatataaacaatagtgaagtaaaccttggtgtactagaacttttgactacacttctcgtgaggatatatttttagaaaaagaccaattgttgagtcaaagggtgtgaattttttaaggttcataatatttacatagtcattcagtcaatactcattcagcaattcattattaaacagttaacacaagacaaaacactaggttaataaatggggatatactggaaaataagagagactgattattggcccatggagcttagagttaattgccaaattgcttctaaaactatttgctttaccaatttatgattcccccatttgaagagtgtatgaacatgtctttctgcctgtactcttgatgtttttatctttgtaaaatcctttattaatttgataggttaaaaattgaagaacattgctatagtaatttgcttttatttggtaattaaaatgagtacctttcctatgactgtattctattacgaagctcttatgatgtcttctataatacctgccacaatagattactatgcccagttggcaatttaaaacatgcttaattttttgactggaaggaaggaatgaaggaaggaaggaaggaaagtaggaaggaattaaggaaataaatacaaataggaaagtagttcccatttaaaattcctagtaagataaatttccacctatcctaaatatagcagggtcttcttaaccatcgtcatgagtgatctatgcacctgtctttcttgtcactgaaacccctttccttgtgtctgttctctggaaggaaaagagctgaatgttctttttttttcaccctgatataagtgagcaagattaaattgagtgacatatgaaaaaatagttcatgcaacagacagaagtagacaggctatctgcctctatctgtagacagtttgcagaagagtgcaatatggacattaaattgacagtaagagagcttgaagaggaaaaacaatgtgactgatcagatgggaaagggaaatatcctggaaatttcctattttagtatgtttacatagggataggaattttatgaaatttgaatatagacatttaaagataagtttgagtctacatgtcttaaaatgtaggcagcctccacccaaaatcaaaaccattatatggttttgattgtataacattttatctgttacaaacacgttgttcttatactgctgattctaatatttagaataaaacttacagatgcaacaactctcttgactcttctcatcaaagctgggcaccttctggttgttccaaggaaaagtgaaaacaacatacctgcagcatgacagcagtctggtttctagtagaagaaacattattttcgaaggactgaatggaatgataacagttaaataggttgaagactgtaagtacgttgaggaaagagattcttttgagtttacaaaacaacccaacataattgggagttccctatggactcgtttttccaataactaaatcaaacgcaagtataacaattgactttaagatccctaccactctttgcagttcactcagagccttcagtctattttcatcattcttcttctttcttgctcttcattgcactcaaacctgttttacaattcacttagtgtgccaagtcagaaatcaggaagtcatcaccagatccattacatttctattcctagggccctcatgaattaatcaatcactaattgatatagaattatatccagagtgtttcaaatattttccctttttacatttctgctctccgtgcttgagttttggtgtgttatcattcccataaactgtttgcaataacctgtagcctcctagatctcttcaatccattatgaatattgctgccaaatttatcttaacactcagttctatttgtatcacttactgatttaaatgatttaacaacttcaaatcatttaaagaaggcttcactttaagtgtaatctgacttacacttacgtatctwtggaaatgttaatgagtggtctatgttggattaaacatgttttaagcagttctctattttttatcctaggatttttcaaagctcttgggggcttatatctccaagagactggtaaaatatgtggaacgtttcttaaatgtgtgtgataatgaaatccctttttcgtgaacgtttatttatgaacatctcatagaaaacagattgccaaccactagtttacaaaataaaactggattccctagcaaagcattcaaggttgtcttcaatttggccccaatctgtatttcccgctccatctccaaccactactgttgtgttctggtcacacccaactattcactgttctctgattccctgaagccaccatgcagtctccagccaaatctttgctcatgcttttctctctctctctctgtaatgactctatttctgtgttggataaaatctttctcatcattcaaggatcatttctaatgttatcttatttgagggcttcatttctctgtgctcccacaaaatgtggaaaatatgcccactttacacttagcattgtagttacttacaggtctgtttcaactatcrtattagaagctttgtgagaaaacaaagtataccttatttatttctgtaactttattgccaggataggacctgaaaatgtttatgagtgattgaaagggtggtatctttaaaaattggtagaggtggaacagtgttatatttggcaaggcggggtcgcaaggggcttctttaggtaacactgtgattgggtctctgaacttcacattctgtccttttgaaagcccagacaatcattctaagtgtccagggagatttgaggccaagaaactgactcagactagttaaaatataccttatatcaaggtatgcaaaagtcattgatttgcatgaaacatataattttcacatgaatggaaacgcccatgttcataaaattcatttgtttattcatttgcaaacatatattgataatagatagtataaccaagaatccctgttctaggaacttgaaaacatagcaataaatacaacaggcattgtagtagagaaatatgaaagttaacaagtagacaaataagattacttcagacaggggtgtgctattacaaattaaattatggtaatgtgatatggaggataggttggagaggtgcttctttagatagacattaaagtaaggaaagtattaatgaggaggcaattgagttcctacttgagagatgaaaggtgaaaagggggcaaccttatgacaattcttgggtggtgttacagataaaagactagcatamgcaaggacctcagggttggaaaaagtttgacaagttattataatagaagaaggctagtgtggacaagagaaagtgtcaagaagaaggctgagaatagagtttggagggttaggtaaggctgggtcaggtagactgggggcatggaaggaagtcggcattttactcaaagttcaacaaaaagccattggactcctttaaacaaagacatgagatgatgtattgtatacagtgagaatgagtttgaggggaggggcaagaatggaaggagggagactagttagaatgatattttgcagtacttgtaaccgagagataatgatggctggactcaggtagcagcaatggggatggggatctattgtagagactgaggatatattttgtatgtagagcaaaaaggatggattaaatagtgtggattcctgaggcagaatatgacagtgagaagataagaaaaataaaggaagccaaaaataacttgcaggtattatatatctcttcctggagtcaaaacatcttcagaaaattttaattgcagcaatgtttgaactccaatgttcacactccttctcatctagtaagttcctagatttctagacaatacttgcctctctcactcactacccttgttcttttcttttattcttaacccttaacctcctcccaaacttctgattgattcaatttttcttcagacaggctaatatattaatcaatcatgctcgtctaggtgtttttttttttttcaattctttgaggttacctcacatgggtgagtattgatcttatgaagtcaattataatttaccacattttaagttggaaattgggagagtatcttaataaagcccccagatactgaccacaggctgtagatcatccccacccaatatctgctattgaccctttcccccctctttaggtcttgaccctttctctaatactttcatgaaagatatttggaatatcttatttaaatacagtggatgatgtatatcccagattcctttggaaagttgctaaaaagaatttggggggaatgctgagaaggaaatcatcaattcaccctactgaaaaaatattttagcttttttgagcatattatttcctctctctctctctcaagttgaaatatgaaatcataagtacagctgggcatggtaatcccagtgactcaggagggtaaggtgagaggcttgcttgaggccagtagttggagaccagcctgagcaacatagtgggaccccatctctacaaaaagtaaaataacatagccaggcatggtggtatacacctgtagttccagctactccagaggctgaggcaggcacatcccttgagcccaggagtttgaggctgcagtgagccgtgattgcaccaccactgcaccccagcttaggttacaggcaagaccccaactcaaagagagaaaaaaatcataagtacatctctggaacacatccattgggttcattaacaactcctccaaacgtgaaggagaaacagggtaagagattgagaacatttacagtggaatcctgtctgtttctcacaattaagtttcaagtaacaaaatcatatcacaggcctgtgtctgttgttcattctaagtattttatttcaagagtcgatattgattattttaattaaattctaagaggaattttgaaaaaaaaagccaaacattgctctaaaattttttcctcctttaaatttcagttcgattttaagatagtaataaacaagttgtgttttcgggaatacgtttcagccactgggaacagatattccctctgcaccttccagaccaattgactaaactgatgtagaaattgataaaccacattttgtcattatctgaaaatgtcctgtcatcatgagatgtctttatccagagtggcagtagcttggcataatatccattatcacatcactaaaattactgtatgatagaataccattatagtygccttgacagagtgcatagtcttctgaacagattcttgtttcagttctgtaagctgtgtatttcaagggtcgtggtttaattcaaagatcagcagaaatattatagtggcagattatatcaagtgatctgacccccccaatgtgaattcatgtttgaatttcacaattcagaagaaaatgagtgagtgtgttgaaatgaaaggcacagaagtagaaaccaggactctagtatctgtactactctggaccctgaatcaccctagtgaactcgcagaatcttagtgtctacatctcaactataaaatgaggaagttcaagtagatttaaaaaatgattcatgtttcactgtgtcagctccgattgattcctagtgattgtctggattatggtgctcagaagaatgatgagacttcatcaaggcacccccagaagagaatacartgaaaattagtatagccatgcataagaaagaaaaaagtggcagcctggatgcatagtttcttttatagccctggcatttgataatgccatgtgctttatgtgatggctttatgttactattataattatactaacaactaccaactattaagcatttctcatatactattaatattattttaacataacccccaaaataacatagggagataggtcatcttatcctcattttatagatgcacaagtagacttttagaagcaaagtaacttaccttaatttataccatgaccaaggaactgatttgtaatcagagctcaggttctgagtccaaagagtcactgctttcatactaattttatgcaagcctgcattcgttgatgaaaatgatcagagaactatacttatttaggtaattatacagctcagaaattaattattgctgatgggttttctggaaatttaatatgtttaatgatgaagtaaaaacaatatagttttcaaaataattcacttacacctctgaaagttctatttaacgtttcttttaccttttgagacttcatcatattttattggggtaaatgtgtcaaattctgaaataaataaaatatttttgacctcctttgaaatttggaagacaactagatataatttaggcatactcyacccttaccccaagctcagagcccagtgtggctaccgcagttctatccaaaggacagattggtgacctacctaacacagaagataacgttcattaagtccttaataaattattgctgaataaaaaatatggcgttatattcctaaattttgtctcttatagagagcaagagatgttcttcattttcatttatttawtttttttgagacagagtctcagactgtcacccaggctggaatgcagtgccgcgatctcggctcactgcaaccttcacctcccaggttcaagcgattcttctgcctcagcctctgggatagctgggattacaggcatgcgccaacacacccttcttatttttgtatttttagtagagatggggtttcaccatgttggtcaggctggtctcaaactcctgacctcagatgatccaccgccttggcctcccaaagtgctgggattacaggtgtgagccactgcacctggccaagaggtgttctttaaaaagctagctcaatttcctaatttttacttatgcataataactttaagatattacttaataactttaagataataaactcatacaactcaataaattaaaaacagagtggttgtttagcaagaaggacctaggttagaatatggagagttaggccaacagctgcaatttccagtcttgctctgtatcttctagaacttacctcctattgtgttacagtgttacaaggtgaatggtgtactgtattatctttcatgaacctttataccctagtctgttatatggctgctattacatgcagactctttttctggtggtggcaatgcgtggtccagggagggaaggaaagatggcgttagacaggaggttcatgtcctccccattttgtttttttctgtagaatatctagttattgcataattggggaaatttagcttgccttttagacaatgttttttaaattaggtatgagtatttgtgatgagttctagattgtccatataatcatctcttcacttcagcaacggcttagtttaagagaatcattcttattggaactctcattatatgaagtttttacccatctgagcctttatgatatctttatttttatttatttattttttgagacggagtctcactgttttcaccaaggctggagtgcaatggcctgtgatcttggctcactgcaacctccgcatcccaggttccagcaattctcctacctcagcctcccaagtagctgatattacaggtgcctgccactatgcacggctaatttttgtatttttagtagagatggggtttcaccatgttggctaggctggtcttgaactcctgagctcaggtgatccatccaccttggcctcccaaagtgctgggattacaggcgtgagccaccgtgcccagcctatgatatctttaaattgtgattgaaaagtagggtgtgatgaccttttgtcttatatttcatggaatctaaaaaaaaaagttgagataaaaaatgaatcaatgactaaatctacttgcagagatcttgcctggactattagaactgccttttaactggctttttgcctccagtgcaccacaaaatctatccacctaaagctgccagaatacttccaacacacaccacccgccccacacccccacacccgacacacacacacactgccttgtcattctgcttaagatccttcattggctccacactgctttcagatacagaccaaattccttagtgtgacagagaaacccctataacttactcactgaccaactttaaaccttaaatcaagcttgtccaacctacagcctgtctgcccaatacatatttgtaaactttcttaaaatattatgagattttttgcaatttttttttgttttttagctcattagctattgttagttttattgtattttatgtgtggcccaagataattcttcttcttccaatgtggcccagggaagccaaggattggacccccctgcctttacatctaatttatctcccttcccacttctgaagtactttattcttctgaaaaaataagaagtaccaccttttggatatagtatgtaatttctcgcatctaaactttcattctctatcaagtttgacaaggcttaatagagtcttttttatgttaaggtcaaacccagataagatataggtgccagattctgatagcttataaaaatcagaactactactgataaaaagctagcttggaagaattggctatggtaggcagccaaagggcttgctaacatacccctgaactcaatttacccttcaaattatcaatttctcttgcagaagcatagcttctcctagctaacctcatcttacagtgaaaagggaatgctaggctctagcaggcaggctgactcccaggaggcaggggtgagctgagctttcctagtcccatttttcaaacttacctagcataaaactcccatcttctggggatggggaaagaggtccagagaattagcctggagaagtctctccactggtaactataggcatgaggtgagaataacttaccacatatgtcgttactctgagcctggaaaatcatttcctctcttgtctttctgccaaattcctgccgcctctgcaaatccagcttcagtgacatttctttttgtctgtagctttccttggtctactttttcccaacctcgcctagacttccaaccaatatggccatgttatttttcatcacactctatagtcattccgtcatgatgtcaatttagtgaaatgattagctactgtagtctgtgaaatccttaaaggcagggcagtattatgtgtcaccaatacctaagacaaagtttagaacctgtaagcatttgataaatagagggggtgttttccaaaatacttaaaagaaactattgaagataacctactttgatgattccctactaaatgacaggagctaggctggaaatttattcgtattaacttatctaacctacacaacaactgtgtgagactgaagatattagttccattttacagatgaagaaataggtttatagaaaaactttgcctaattagctaattatttgtgctaccaatatttaataacaaattgacttgtttttacatgaacccttgtgcctctctgatctttgtgtcatctgtcagctggaattacttttgtttttctgcatataaatcaaacggagataaaggtcattgcatgaggagaaaaactcatgctctaatgtgtttttgctttatttaataagcttatataaaacagttaagggagaatataaatttagagattaggactttaatactgactttttcatgttttcaatgaggggatatatactccatattgtttataatacataatgtaaattatactactcattaatgataactcaaaaggtagcgtactgtcagttgagatagttaggatttgcgcattgcccatttagtctaacttggcaatattcttttttgtctacctaaccttattaattctgttttattttaaccataacttctcaccttgtacctgattggatttatttcttttatatatctaagctaacttagctagcctttaattgtttttggtcaatggtcagtcatatgtaataaaaactgcctcatctttagaatacacagagtaaattataaaaagttatgagattcctagataatttactgaattggttactaacaaatttaaaaagtagtaatttttaaacaatagtagctaacatgtattgaatgtataatgtatgccaaataacacttttaattgctagatgtgcattttttttctagacatcttcacaaaaatataggggttagttacttttcttccccatttttagatgagacaataaaacttcagagagagtttaagcaacttactcatagcaacactgagtgattttagcattagaattcaaaccttggatgactcacattaaaaccttgcttttttaaacaatgtactaccaaaagaacaatttctactttctgggagctgatcactgtctttggagacagacaaaattgaatttaattctatctctacaaatagcaagctttaagaccctagttatgttactcaatatctctmccacttccttttctcacctcttagatgggtacaatgcctatatcacagggttactttatgaaaagacctagtacatgaagaatttagtgctgtacctggtacttggtggatattcaatcaatgttaaatcattttccctcacacacaaaaactcatttctgtgtttccaaaaatgttttcacgttttgtatttgagtctcagaagaaccctgcgataacagggattattatccctgtttctcattagagcaaataaaggctcagaaaaaccaagaggctttcttttggtcatacacacctcataagcaacagagcaaagacttcacatttctcacttgttttcattatagcatgtatgcctcctggaaaaacatgtaaagtgaaggcagaaagcagaggatgtcaatgaaatctaaaaggcgcctatgtgaaaaaattattttacaaaaacttttgctcaatcttctgtccctcctgtccctgagaggcaataatatagaatgaaataaggttatattgcattagaaatatttttgcctttgctcagtgaagaccatgatctgagttgacatctaatcatattatttcagcgctatagatactcagcctttaccgaggactgctttataataggctagaggctacattgggtaataccagaatgagcaaacttagttattgggagtgatcttgttggtctttgttaatgaaatctgcaagccccttatgtaatgcattactatattctggatctggttactactttgaggggcctgaccatccagaaaacggtactttcaaacaagttttctttctctgatcatcacacagtatcctaaaatactttgcacgcataggctggaagtagagatagtcaaagcaatctgctcatcatcttgcagtttgcatttagtctttcagaactatttctcccacttctgccttgtttacgaacagagtgagacagtcatgcctgggtggatcatctcccatgtttgcctaggaatcctctctttctctactaggcttcaggaggttagactgtagctttaaaggttttcctgtgagtcagaatcttggggtaaagcctcacttatttagaagaacttgcttctaactctatctctagacctaaaagaattacctttactcatactgagagagtgagtcatgtctcatttcccccatgagctgagatgcagaggccatttttctctctgtatttcaaaaggcttaaattccaattattttttgatccctcactgtcagtgctacaatgaaatttttctgtattaaaaaaataggtcaatgaaggccaaggtttggctgattcttgtaattttcctaatttcctcataaaagcttgggccaatattttttaattccaagtttgtagctttatcacagaagcattgttcgttaatgactgtgctttgtttcccatttttgaaagagaaattcttttgttacatttgaaagaacttaaacatgaaaaacttaaggattaactttttaattagatataatgattagaaactcttcatcatggcagttttcctttcattatgaaaggaagttgacagtttctgttcaattagtgttcactgaaatgtttttaaatgaaattattgctgagtaaaggactccaaaagaatatgacatgattaagggccttgcttttcgactttttaatgaagagattactgatgaaaaaagaattcttgcgaagttcacaaaacatatttctgtgcatgagcaatatttaagtctcagttcattataaaagtaaatatcacaaaagcttctccccactataaatgtttgtgatccctacattaactgacttttaattatgtcaacatagttcaatgaagcaaagtttgcaaggcctattttggtggaatccattgtctgtgactatggtgctttggaagagtttacatatcactgtcttgacttcatagtataatttcaaatgttttatttcgtttcatttaggggtttttctgttgatacattagcattctctatgcaatttcatttgggggtgaatagacctagatctcatgagccctggagatcaatgcttttaatgactctgagatttagttacacatcttattctatcttagaagtacttggttctttcaaataaattctaactgaactccctgaatctaaatacttattttaacaaataactgcaaaatatcttttcagtcataggtattctatcttcatagcttcttattgcctaaagtatcaaatagaaatctattatcaccctcatcttggaggccttctatacttgtcccttcctgatagcattaataaaataataatactgttgacaatagctaacatttatttattaatctttagtactttcttatactctaagaaatatttaagtgtaagtattcatttaatcctgacaataatcctaggagattaatattattattaattattattcacaatttatgagagagaaaactaaagcttggtgatattaactaaattttccaaatgtacattgtaaataattaatggattgttaattatttaatatcatatgatatcaatttagtgaagtgaatagctacccagactcatctaccttccctcagaaatatttttaattaattattattgttccactgcctacaagctttactagaatcaaggactgcctctctcccgtttccatactatttttttaatccaaactccatttctttgctttttcatttaatgcatgacctttccatgcactagtaatccaagttcacctattggctctcacctgatcacagttgtctcattacagatgttggaaacctcaaagtcattattaatgacaccttctccttctatatgaaatagacgaataaagtatttgtgtgtgtgtgtgtgtgtgtgtgtgtgtgtgtgtgtgtctaagagagagaaaaatakggagggagagaaggagagaggtagaagtaaggaagagagaagaaaggagagatggagggaggaagaggtaaagaaggagagagagatagaaacagagacttacgcaacactgactaaaacatgcagctgctacccagtgaagatacattgattagagcagggagtagggagaacagattcccagggagctttgctctgaagtcattttaatatcctaaaagtgttaagacaagtcttacttgagtctgtgaaaattctatggtttgaaaagaaaagaagagtattcctaagaagtccaaagctttagccctggccccccaacactatctaattgcataatcacaggcacagtccaactagtctagatctcagtttcatatctgtaaaatggatataaccatcccgacctcctaggattgttgtaagaatcaaatgtgatacttttatgatgatgaaaatgtaatggaggttaggccctaaaggtgcttgtgaattagtgagatgataaaatctgggatatgggcagagcttactaaaacaccaaatacttttatttacacagaaatagaaatatgtacatgtaaagaagacagataataggtaacaattattatttggtacttattttatgctggatgcatgaatcaactcatttaatctcccacaacaattatatgacataaacatcattatcaaacccactttacatatgaggaaactgaggcccaaagtgtagagtaatctggtcaagatcagacatttaaaaagcgttgaagttaggattctaatctggaaagttgacctccagatcatgtacgcttaactatcctctctgcttctgcagagagatgggaaagcttaggcgtcaaccccagcctttggtaacagtaaagggattctaacattacaaagcccaccagcacagctcctttccatggctcaggggcatctctgagtcaaatttacctctcaacagcattccctgtcctcactcagacacttgttgaccattatggcccttaggctattgaaaaatagtttatttgagggaaaaaattgagtgtgccatatagatcttgctattcaaaaccttggaacatggaagtgcattagcatgctaaaagtaccatttaagagaattctcattttcaaatgagatttttctgcttggccatacttaagcagcatgaaagtaaaagataattttagccagccatctttaaaagttattccatgttctagttaacaatattgcaatggcttccttaagattagagtatcttaactgtttactagagtagaccacaagactagctaagtgtatgatgaaagcaaatttactcaggagagctattgacttttttttacccccttgcactcctattacatgagaagccctaaccacctctcttatatttaatatgctgtgagtttttaaaagcagcagagtggagcatcactggaagccactgtaaagtctgagcttttcagcccttkatatagagctaggtgtatatttctgtgcatggactacaaggacaacacgtgataaagaacttggaagagaaaggagatgaagtaatctgagaaggttaaaaacatggtaatggcagtaaaaggatacatgctggtaagaggaattgagagtgataaaacctaggttaatggattcctaggtctaccgtttattgatgatgtgattcaggggcctctcattgaaccactcagtgtgtcttctacctcaatttagaaatagggttgctaattctggctgtgcatattccatagagtttgtatgagaatgaaattcattcatttatccaacaaatatttattgagtacctactcatgctggacactatctatatatagatgatacattgtaagcaaaagaactagtttttatccataatgaagtaattcaggtatgtaatgtaaacatcacacaatagtcacaaaagaggtttacaaactagtttccatgaaaagctataacaggatgtcgtgagtaaggtatagggcagtggtgctcagctgggcctacttttgtttccctagggggcattaggtcatgtctggagacctatttaattttcacatctggaagaaggaaggattactggcatctagcaaatagaggacagggatctggtaagcctcctacgatgcacagtgaagctaagatttaaatgataagtgggagagcattctggagaacaggtgggagaagatttgaggcagaagaactggcatttgcataggaaccaaaatgagaatgggatgtattatatcctaaataatggaagagggcctgtggggctaggtcacagagaagggggagatgggccaagctgaccctggtgacagacaggtccaaattattccatcagagggtcttgatgaagtggttgtgaaggctcctgagatttaacttgagaaatggagtgggcggagctgggatttactggatgaggaagttgaaagagaagcakatttgaggagggaagaaggaggatgaaagctcagcttttggagctgttatatctgagaggtctgtgagatatctgagcagagatgaccagcaagcaacaggatattcaatttaggagagaaatctgagccaaaaaaataaacaagggagccacttacataataatgtttaaatgtgtaaatagggagaatgtgaaaagtaacagagaagtcctagttataaaagtgttttgtcaatcgaaacatgctctgcaaatataaagaattcctaacatcaacatcaagtaaaacattttctacgtccacctatttatttaagaaacctttggtgtcctttgttatatgccaggcaatgcactaaaggctgagaacaagctgataaatatgattaacacctggccttgaaaagtgtcaagaaagcaagtagggggagaggcatattaaattcttaatactgccctacagttgagttcaggtagctttccttctgtcaagaaagtccagtagagaatggctgagggctctagatggggaagaagatggtgaagacacacttcatctgcctcacggttctatctaggttagtcctggcttgactctggtctgaagtttaacatgctgtgatctagcattctgcagaactatgtgcaaacaagacctggggtcccacctacttcagtcaacttctctcaggtctcttgttttctttcccttatagtactgggcatatgattccagagactctgcagtgtgtgtaggatatcactgtaatacgatgactcgcgtctcttaagcaggtttgagacatgactgaatgattgaatatgtagcacaattttatattatatggacttcaatacaccacaggtcatataattccccttataaaatatggcatttgccattttgccatggcacagtcatgtgagtcttgcccatcaaggtatcactctctcaaataggaaaaaatgggtcagatgccaggtttgattttttttgagacagagtttcactcttgttgcccaggctggattgcaatggtgcgatctcggctcaccgcaacctctgcctcctgggttccagtgattctcctgcctcaacctccagagtagctgggattacaagcatgcaccaccacgcctggctaattttgttatttttagtagagaccaggtttcttcatgttggtcaggctggttttggacctcaggtgatacacctgcctctacctcccaaagtgctgagattacaggcatgagccaccgtgcctggaccattttttgtttttttgtttttaagagtcatggctgaattcaccatagatctttttaatacagaaaatcctggtaaatatactaacatatatttttgaaattgtaattagcttttatctatttaggccccattaatagtaataatatcaagcaaacctttaaagagtcttatattctaggtactgtgctggagctggctgtacattggcttctgctctctgagcttacagtttagtggaggaggaagaaaattaaaaagtaaatactatggaggaaaaggaagcaaataggattcagggaggaagaaaactaggaggttacatcctttagactagggtgtaatggtggttaggaaaggtgaatctacaattaccttatataattactgatcactggtcaaatgtatgttggactaataaccaaaagatgtgaatttaatcttagatctattacttaattcttacttgttaaataaatcagtaaagttaaattaatttcataaacactaataatagtgcttactatgtgccaggttctgctctaaagttttatcaatattaactcatttaatcctcaacaatcctatgagataagtactattatctcacaggctctatttacagaaactatggaacttggccatggtcacaaggctagttagtggtgatgtcagttactttagcctctgtgaacctatttctctatctgtatattacgaataagaccttcatggggatgccatgtgggaaagtagctttttaagcagtaaaatgatagatatgcattgttataattttagtgtcagttgtaaagtcaatattacaatgatgtaggctctgaactttaaatactatggggaaactagaaattttaggatagaggacctcaccctccagagagtttactctatcacaggagagagattaccagcatatatgacatagtacatacttcaaaattacatgaagtggttctgctaaatttagggccatacctataagtgctgagttgtgaggaaaatgggattgttgatgtttaaaatatayctatagatcattgagttatggctctgaaagaacttgagagttggttgcatctaatcctttcattttaaaattgagtcattgaagcatgtcaaagcaaaatgactgaaccaagatcttacagctaaattagagcaagaaccataactagaagtaaggtcctggatggtaaagtcttggtctttttctctgattaaacttatccatatcctctgcctcccttcctgctggaaggtcattgctttctaagcttttttttctcccccaacccctcttcaaggagacagattgaactgcaagattacagcattaaatgatgagtgcttatcacttatgataagccccaggagtataagacttcctgatggtttctctagaaacttaaaaaaatttaaatagcttcactgaggtacagtttgatgagttttcacatatgaaaccatcaattcaagatactaagcatatccatcacccctctgcaaatttcttcatgcctttttgtaatctctccagacttttgtaatccctccctccaactaccttatcctacctgctctacctccccattcccagtcaactattactctcctttctgtctttatacattaamttgcattttctataattttatataagtgagatcatatagtatgtactttttgtttgtcctctttcactcaacatgattatttaaagattagtccatgtttttgcatgtgtcaatatttcattcttttttattgctgaacactattctgttgcatgcaaataccacaattgtttaatctattcatcttttgatgttatttcaagcttttggctattacagataaagctactatgaatatttgtataaaagtctttgaatagacatgtgcttttatttatcctcagtaaatgcctaggagcagaatcattaaatcccagggtaggtacatatttaacttaagaaaaaaatactgacctgtttccaaaggggttgtacaattttttatattctcaccagcagtgtatgagacttccaatcttccacatcatcaccaacacttgatatggtcagtctttttaaatattaaccattctaataggtatgtagtagtatcttactggggttttaattttcatttctctaacaagtcatgatgttgattatcttttcagatgcttatttgatacctatatcttcactggtgaagtgtctgtttaaatctttggctcatttttgggtttttttttctgattgaattttaagagttatttgttttatcacatggacacaggaaggggaacatcacactctggggactgttgtgggctggggggaggggggagggatagcattaggagatctacctaatgctaaatgatgagttaatgggtgcagcacaccagcatggcacatgtatacatatgtaactaacctgcacattgtgcacatgtaccctaaaacttaaagtataataataattttaaaaaaagacaaaaaaaaagagttatttgttttttagaaacaagtcctttatgagatgtatgatttgtaagtatctcttttcattctgtggcttctctattttcttaacaatattttttaaagaacagaaatttttaattttaatgatgtctgatttatcagtttgttcttttatggattttgctttttgtattctacctaacccaaggtcataaagatcttctctcatgtttttctttagatgctttatttaggttttacatctaagtatataatccacgttgagttaacatgtaacaagaggtgtgaatcaaagtttgttgttttgcatatggataaccaattgtccctgcatcatttattgaaaatattatctttcctttattaagttgcctttgtaccttcattaaaaatcagttatctaggccgggcacggtggctcacgcctgtaatcccagcactttgggaggccgaggcgggcggatcacgaggtcaggaaatcgagaccatcctggctaacacrgtraaaccccgtctctactaaaaatacaaaaaaaaaaaaaaaaaaaaaaaawaattggctgggcatggtggcaggcgcctctagttccagctactactcgggaggctgaggcaggagaatggcgtgaaccagggaggcggagcttgcagtgagctgagatcgtgccactgcactccagcctgggcgacagagtgagactccgtctcaaaaaaaacaaaaaacaaaaaaacagttatttatagatgtatggttcaacccctgtagtcactatctgggattcagttttcagagcatgaaatcttaatattatatcctcttttttctttttttgtagttttcagtgtacatgccttgcacactttaaaaatcagttttatataatcccagcactttgggagtcagaggcaggcagatcacctgaggtcaggagtttgagaccagcctagccaacatggcaaaacactgtcactacaaaaaatacaaaaattagctgggcatggtggtgtgcgcctatagtcccagctatttgggaggctgaggcatgagaattgcttgaacccgggatacaggggttgcttgggtgatagagcgtgactccgtctcaaaaaaaaaaaatcaggtttatccctaagttgttaatatttcaaaaatttgtcgtaaattgcattattttttattttaatttctatgaatttattgctagtatatagagacacaattgatctttggatattaatcttgtgttctacaaccttgttaaatttgctaaagattctactagcatttctttagaattcatgagattttccacagataattatgtcatgtgtaataaaagcatctttatttctttgtttccaatctgtatttattttacttgccttgttacactgtttggaacctctccgacaatgttgaatataagtggtgagaagggacgtacttatcttgtcctaagagttttttgttaaaaccagaaatagatattggattttgtaaaatgttgtttctgtgcctactaagataatcgttaagttgttaattagttttgtttctttaaaaaaaagttaataaatgctcctaattctatccctcccttagcayccccatgccacaacaggccccagtgtgtgatgttcccctccccgtgtccatttgttctcattgttcaactcctacttatgagtgagaacatgtggtgtttggttttttcttcttgtgttagtttgctgagaatgatggtttccatcttcatccatgtccctgcaaaagatgwgaactcatccttttatatggctgcatagtattccatggtgtatatgtgccacattttctttatccagtctatcactgatgggcatttggattagttctaagtctttgctattgtgaacagtgccacaataaacatacatgtgcatttgtccttatagtagaatgacttataatcctttgggtatataccgagtaatgggattgctgggtcaaatggtatttctagttctaggtccttgaggaatcgccacactatcttccacaatggttgaattaatttacactcccaccaacagtgtaaaattgttcctatttctccacattctctccagcatctgttgtttcctttttaatgatgaccattctgtcttgagatggtatctcattgtggttttgatttgcatttctctaatgaccagtgatgatgagcttttttcatatgttttttggctacataaatgttttcttttgagaagtgtatgttcatacccttcacccactttttgatggggttgtttgtttttttcttgtaaatttgtttaagttctttgtagattctggatattagccctttgtcagatggatagattgcaaaaattttctaccattctgtaggttacctgtttactctgatgctagtttcataggctgtgcagaagctctttagttagatcccatttgtctattttggcttttgttgccattacttttggtgtttttgtgacgggttgatgggttcagcaatccaccatggcacatgtatatctgtgtaacaaacctacatgttctgcacatgtaccccagaacttaaagtataataaaataaataaataaataaataaaataatgtttactatttcataattacaatttgtgaaaatagttaacgaggtgttcaacatatgaataaattcattatttaattttcaggaaaagaaaacttaataaatttcattggttcatttgtaaatgttaaaccaatttcgtattcccaggataaagcctacttggtcatgatgcattatcctttttatatattgttcgattaaatttgctaaaaaattttttaagaatttttgcttgtatattcatgagggtttattgatattagcttttcttgtaatatcttcatctggtttgggattagggtaatgctggcctcaaaaaaaaaatgatctggaaagtatttgttcctcttgagttctctgaaaaattttgtgtagaatcgttattatttctttctttaaaatatttagagggaatttatcagtgaagccatctgggcctggagttctcttagtgggatgattttaattacaaatatctttaatagcttatgatgtgactatgtaaagtacttatttcttcttgattagtttgcatctttcaaggaatttgtccatttcatctaaggtattaatttttggggggaaaaagttgtttataagattttctcagccaggtacagtggctcatgttttataatcctagcactttgagaaactgaggctggaggattgcttgaagccaggagttcaggaccagcctgggcaacaaagtgagaccctgtctcaaaaaaaaaaaaaaaaaaaaaaaacttagccaggcgtgtggtcccagctactcaggaggctgaggccagaggactgcctgaagccaggatttcaagtcttcagtgagccatgatcataacattagactgtctataagaataaataaataaatatatacctacatacataaagatttccttattagctcctcatgtttgtaggattgtaggattggcagggatgtcatcttcctccatcttgattttgataatttgtttctcctaatcagtcttgctagagtgtcatcaattttattgatattctcaaagaaccagctttcattttcattggttttcctctatcttctgtgctgttattttttatttcctttcatttgcctactttgggtttaatttgctatattttttttctcgtgaaagatggaagctgaagtcagtaatttgacactaccttcttttcaaatataagcgtgtagtgatatgtatgtttccttaattactgctttaagggaatccagcaaattcaatatattgtagtttatgttcattcagttcaaaatatattctcatttttaatttttttctttaaccagtgagctatttggaattgtgtcatttattttcttaatattttgagagtttccagagattgttctgttattgattttcaacttagtcctattatagccagagattatatttcctgtgacgtgaatctttttaaatttatgaaaatttgatttcaagttaaaaatatgttctatcttggtaaatactatttgagcacttaaaaatgtgtacattttgctgttgtggagtaaaatattctataaaggtttattagctcaaattggtgcctagttttatacaagtcttctctatctttacagattttctatttgttctattaattatttaaaggtgttgatatcttcaattataattgtggatttatctatttctacttgctgccttgatcttcccagcaaaccaattctgtcttctcaacgcaacaagtccattggccacaactggattcctcctttctggaatatggcctggaagttaaaggctataagaattagaaatcacagggcccaccttgtttgtttcttttctctctgtgttcattgttttttgtctcatgtgcattcttgaaacccattctttcctacattgtgtccttttgtttggttattttaggtgggamtgcaaatccaggccctgttactctatttttactggaagtgcaattgtcatgaagttaaatttaaaccattcaccagcagaaagcactcaacgtatggtagtcccaccatacaaaggtaccgttaggtattctgaggtctgcagtctaagttagagcatcgtgacatatttagatgtgatagacatgtagcctagtgactgcgtgtttaatggaaaaaaaatggtagcaattacttatcaagcatcgtgctaacaggaagaaaatacatatgctccacttgtgggcagagacagttgcacactgagtgatagtagaaaagaaacagaggattgacataatattacatttatctttgtgttctctatttctagcacagttcttggcacatagtagagctcaataaatgtttgttaaactgagtcaaattgaactaagttaaatatttgataaggtaaatattggatttatagtggaccccacttgaacttagaaagtaggaagtttagaacttatgaaagtgggcaggaatacaaaacacrtaatatttgcttaatgaaaaataataagtaatataacctaaatgattgagccacctagggcctccaaacgtatatcaatgtgcctatttcaaacagtgaggaataaacacatagaacttatcacctcaagaggtttaagaagattttcactgaatttatgaacatgaattatctgtgagttggttaaaggtaatattggttagcatcaagaataggaagctattagttttcaatcaagaataagctcaaatttggtctaaatcttaattttaagctgggtaatcattgatttacaatttttttcttggtgtcacatttcttccaaaacaataatcaatgaagcctttcccaccctgtgcctttgctgtacctttcctttctcagaattccccctatatctgtataactaaatactaccctaacaacaractctagcaaagtgctaaatcttccatgagcctgccctaatgtccaccatggatataatctcttctttttcattgctttctaaatagtttatgctacctcttttatggtacttacacgtttttaaatttgcctttttgttatttgtgctgatttaccatcccttctgttagattctccttaaaggtagaggcaacatctgatgtattcatttgtccaaagtactaccaaaaattatagcacggctgggtgtgtggctcatgcctgtaatcccagcactttgggaggctgaggcaggtggatcacgaggtcaggagatcaagaccatcctggctaacatggcgaaacaccatctctactaaaaatacaaaacaattagctgggcatggtggcgggtgcctgtagtcccagctactcaggaggctaaggcaggaraatggtgtgaacctgaaaggtggagcttgcagtaagctgagattgtgccactgcactccagcctgggcgacagagcgagactccgtctcaagaaaaaaaaaaaaattatagcacatgggagatgcttgatatgtttgttggatcaatgaataaatgaatgaatgcaagattcaaagggcagtttttaaaactgtttccacacacaaagactatgaattctttacctttttttccccaaaaactaaagagaagaggatttttaggacatgctctttaaaggaaagaataaaggaacctgataaacaggaggttggaaaagcctcacaagacccagcaagtggggtctggaataatgataagcatttgcttaagaatttcagagaggaatgactgggattttggaaggtaacttaaaagacagctttttattttcytgttgtttcctgagaaattcagaacatttactagtgaaggaatattttctgaaagttgtgggctggctggtcgacaatgcatggagaagaagcatgtggctggggcagatgggagactataagggcaggaatgaaggcagaggagggactgtgggtgtgagctgaacagaacaccatgaatgagaaaaagagaaggttggttgaattgatattgaaaaacaaactgtctaatggcaatagccttatggtgtgtgctcgtgaagtactaaggaaaaacaatttccctacaaattaggtaaaatttacaaattaggtaaagattttgaaagatcagttctacttttcattccttcagttcaaaattgaaaagaaatgaaggtaagaggaaaacttccctggtgtcagcctttgagactttaacactacaagggcattagtatgaaccagtctaccatcatcagggtacaaatggaggaaaactaggtaacccaaatcatgctgctcttccaaaaataatacagggaaaatatttcgtgtatgttatcaaactgtttcctacaatttgtaccttgtttggtcttccttggattttctaggtcaattaaatgcataatttattatgctgtgagtttctctccttttgcctcttacctcttgacrtgcttgagtaaatatcaccattgttgactgtgcaaccagcccttagagtacggattcctttggaacttccaagtgctctgagcatcaccttccaagatgccttacctcctagcaccttctagctcagcaatcctacagagacattagggactggtggagcctcacctccctgtgtgggtactgtccttggtgaagggaattgagaatatgtccctaaattctgttcatattttatttcatgcttatacgagtcttttttgttgtcgaagtgcacatgcatatttctttggaattaacacattccagcctactctcatttcccgagaacatttaaagacacgattctccttgtattatctatgtaaattttatctagaataaggaataaaagtgacttttcttcaatatataggcaacataaagttcttctagttactcttacattttatgatgccttctggcttgtctttagagataatcccagataaacaactcatagtgccattaagacagtaatactctgtaggtgaagaatatgtcacatctagctcttaactaaactgagaggagagctggacatattaaatgacactgtgagtatgcatgtatatagttgtatttctgacacagcaaacaagtgctgacatctgtatatgtacatatatgtgtgtatataaccgactcccttcaatgttactacttttcacaagctacttaaattccaccaccatgacctgccacccaaatcttctggtaggaatattttttcacatctctcttcttcctacttctttccccctacacgcttatggtatgtgccatttcaccagacccgtgtgaagacaggagagcactgatgggattgcttttcacaagtgtaggaatgaaaattcttcccgatgaaaacatctgtctctgttcaagtcatgcccagttatcccccaaaagaaatgttctgattaactttttttttaagtcttaagatagcagtttgtgtagcagatctaattaagaagtttatgtaacagatctgcagggtttttttttttttttttttttttcctcttcaactgggttctgtgagctcagtttgagtgttaccagctttcgctatgcaacggccaagtgtttctcgggctgagaattatcagcttttgtgggatactattgcttccttaaaacaatgtgaacaagctatgcaacatgcatttattccggtaaggaaaattttcttttattttcctagggattcttttatttattcttcctttttctcctgttgtatctatagagaaatgtataaattctgtgcatttgatgatcatagttattttctctgtagttctcattcaggctaaatatatggtttttctctgtatgaattcctaattcttaatatgtccaagcattaatcggtgagaaagaataaacagtggtccaatcaaactcatcccactgaagacagtagtttctaatagtggcatgtactaaagaaaggaaacaatattgatattccatatattaatgtttgaaataaactgcaatgtttatttccccattggttcccccagagctacttgaatatcttttgcagttaggtttgatatatagatcaagaaaccaaaattgctattctttactccaagtaaarcccaccaaaaaagttatcttgaaaagtataattgcttctttagtaaagtagtgatgcaatatttagattttgtaaaaatttctgacagaagttgtgtatagctatgtaaagtgaattagtgaatcagtgtcattgtgttttattttggagaaataatgtttgtgtttataatttatttaaccagaggaatcaggctggcaacatttgataggccgagataaggtaaataggactaccaagaagaatattaaaatgtttgattattttcattagatctactttgaagaattgagatcaccaattagctatgagagaagagtcttaaaaaataatctctgctaaaatttatttggtaccttctcaagaaaaacattatttctgacatagaaactcaagagatatgcttctttcaacagttggaataaatcttccttgaagttcatgttattttcaagtgactcaagttagatgccatcatatttttccctgtaacttcgaaatcacttaaatgtcacaaactctgggctatatttgaagctcttctaattgaaccactatattttagttggatcacggtaagttgatcttgactactaaagccataaagcttatataatttttgtaagaagtctaaaaaactaatggtgggaaactctctaaatcattttgctataaggatcctgctttgaactagaatctagaaagtatagtttgcttctcctatgtttatgagacttctcttcctttttttttttttttttttttttgttattatcaaagtgtgatattccttgtggacctcaagtatttcctcgttcacggagccatcccttgccaggcagggttatcttcccccttcttgatttcttgtgtgcatctctgatttatcacctaacattttattcttaagtgtttcctctcagtctctctaattatattgttacttttggggtaaatgtgaataggaaagtaagttggagaaaggaactaacatttatttgtttgtgttgttgttgtcttgtcttgagctccttaaatacagaagtgcatctattcccagtgtctagcacagtgcctggcacataaagagtgcttggtgagcaagtgaggaatgactaaatcaaccaacaagcgtctccaatttccaattaatgcttgacagttttcattattagctttgtctttactgatctcataaaattatttctattaaagtccatctggagaaaactcagaaccttgactatagcattgtggtggtgtagtggtaggggcagggatgtgttaatacatggaatagacccctatgtgtccagttaaccttggattcaattctcataattcgtgggctactctgtctttgattccagtgtgtttccagttttgcttaattcacacatatataaaatcatgcccaaattatcattcaggtttgctttagttttgactgctctaaatcttttcagaacatattgggaatttgccaatatatctcaagcatcttccaagtctttattaaacatatgattatatcatcacaatttcatgagagcttcttttagaaattatagccattattaaaatattatcagttaagaataactctttataaactgaccctcaatttatttttttgtcagcagaaaaggtactctatgtattccctgctttatgcactttttaacccaatgatatgtatttcatgtacacacatgtattttcacttgtatggaatttgtactaatgatacacttcattgtttacagtatcgtaataaatcctgaagtatacatatcctatcatgctgagtctattatgttaaatcagtgacaaatatayggctcaaataattgcctcctttaaaataaaccttgttctcttttaaatcaaatacttgaaaatgaacaatgtctataaagtatagtcacatattgatgtcgttaatcttaggagaattgacctgaaaaggtcgtaagcaagtaaatgctctwctgtgcatctactgtgagtgtggattcctaacgcatcgttagaatgcggagccacctagatggtccggatcatctcactcacacaccataagctatgaatcacaactggtttttcagtcaatgtagttctgtgaactaacaataaacctgacataaaatctcaagtcatgatataatctgcccccagggaacctcccatataaaattcatattggtgaaaggaaccttaaagtggctgatacctggatagtgctgctcaaaacagtcttcagagaagaaggaaaccaaactatgaagtccttcaaagtttcaggatttgatttcacatattagatcctcccctagagttaacaagatgtaaataaaatctggagtctcaagcaagttcatctgctgatccaagagccacaagtgcaaaacagcaacacagaacttttcttatcttttagcctaagtgtctggcgaatgtaagctcctaaatatttattaaatgcatgaataataaaaagttctcatgaagtattttaaattggttccatcattggaggcataaggacattcttctaggcagtcagtatttttggatattaggcaaatcagaggctttgcaattttattcaaatgagtagatatgcttataaaaacagtctcataattagtagttcttttcatagagactggcctgtgtttttattcgtttgttagttcaatcagctcactcacattttctagagcccctactatgtgtcagacactattctagacaggacaagtgcccaaaagtaaacttaaaacttctttgtgacatcatcactttgtaagagagatagtattaccaaatggtgccctaatatctcttgctgcaatgtacaaatttggttttccttatactgctaacaatcatatctggatttcataaaaacattcacacagggatcagtgggtcctaagtacagttcttatgctcatcttgctgctagacttggggcttctgtcagtcaaaaagaagtcgcaatactattaattcattcgttcattcatctcagaaaaacttattctgaccctaatgtgaaggttatgcggcttattaagcattgggagagatataaacgtgtataaatcaggagaacccctaattggaattctgcccccaagaattttcaaattgatttgcaaatcactgtaataccatatgcaaaatgtagagtatcctaagagtctatgaattaccacaagaattcagagaaggggcaagcttcatggaaggctgtctcagctaggtttgaaggttaaacagaattttgacgctcagtaatgatggaagaagaggacattccaagtggaggaaacagaaaaggcacttgtaaattgtgtaaacacagtctatttttccatgtgttcgtctattcaatgaatgcttattaaataccttttatgtgtcagaaattacgatatgcctggaacatctaataataaatagggcacagtcaaaccttgccctgggggtatttaccttctagtggtggggacagacattaaataaacagttacacatgtatctctattacacacttgaatactatcctatgcaagttgtttacagtgtttctcacaattgcaattcaatattacatgtayacatacacagataaacatcaattatcagaaagtgtagcaatagtagatactttctcagtcactacaaacaaaacaaaagaaataaaacatcctcccaaatatgctttagttttaaaatataattcatttatccagcaaacaacacatcctgcttgccacaccctgggctaggtactggcagttcaaaaagtgatagttaatatttactgagtaccaattttatgccatgcactgttccaagcattttacatgtattatctcaattctgtcagcaacttctgatgtaggtactatcatctccattttacaaactgtaaaaaagagatgggccgggcgcggtggctcacgtctgttatcccagcactttgggaggctgaggcgggcggatcacgaggtcaggagatcaagaccatcgtggctaactcagtgaaaccmtctctactaaaaatacaaaaaattagccgggcgtggtggcatgcgcctgtagtcccagctactcgggaggctgagacaggagaatggcgtgaacctgggaggtggagcttgcagtgagccgagatcgcgccactgcactgcagcctgggtgacagagcgagactctgtctcaaaaaaaaaaaaaaaaaaagaggtgaagtacctttcccacagtcacatagttaataaatggaatgactggtccttgaactcagtgwtccaacctcagagagcgttattcttaaccacctcattagagtaagaagaaaacactaaaaccaagaaaactatattgcagtgtgattaggagcagcaattaaaagatgtacaaaccatggtaaatgcagcaagggaagagtgatccatctgcgtgagatggaaaggaaagataaccagcgaaggctagaaaaaggagaaaagtcttgagacagttttaaaacaggggtttacaagatgagggaggtgagaggttaaaaacaactggaacaaagtcactaaggcaagaaagagcagtatgaaatgagagtatgttactaactttctccaacttgtgatctaacactttgagcattacagaagcaaggtcagaacaaccaggatgagagttgggtcrtatttaaggtcaggaattatacaggtaaatcataaaaacaacactaaataattcaagcccacagacaaaggcactggagcctcagaagagaacctcaagaaagagattattttcagaaacctggcttaattgtccctgctatgtgtggcctgacctacaggttgacaatggtgcctagaattgagtatatccatggagaagcagagaacgtttgtgcagaaatgtaaaagaatgaaacaaatgtagaaaaagaaaaggaggtgagaaactatgtggtctcaaagaaagacacagagaaatgaggctgaaaagaactaagagaggctggactgtgactttctgggtcccccaaaactcccagttcttagttccagtttatcagacggcctgccctgctgtgcttcttgtccttttagcctgacaacaaattccaaattttgcttaagccagtgcaagtgagtttctatacccacagccacagaactttaagataggggccagttagtgactagtggtacaggaataggatacagtgctaaagaagatgaaggacggagttgaagagaagataaacagatcagctgaggacagtggtcttcaaagtaaggttgtatccttcaggacttaactcctatccccttccacaagcctttccttatgcctagtaaccagaagacatgccttttccctccttacttcaaccctgattaacatccccctgaggaaaaataagagtagggaaatttcttaccaactactttawwctatacttttgtacgcaatcatcacaataccaacatgaaatggatcattgttattatctacatttcagaggattagtggggttaagtaccttgtttaaaatcttgtggccagtaagaccaggaaagaacctaggtcttccaaccgtaatcccacctgcctttcttcatgcctgtcatgggactttgtccctatttctctcgtgcatttttttctgctttggattataagcatttgggaggtttcttttatctccacatgacattatgaattccttgcagggcaagacyatgcacttctcctcttcctactttctgcagtgccaagtatggtttcttaaatattatgtttcctaagtaaatctgcatagatggaatggtgaatacttaagaagggagaatttaggcaacaatgaaacgataatgaggaaatgatccttcttgcctcagataaattcttaaactatgtctcctgagctccagcatcacatccaccaactctgcctctgtggtccctggatgtatagtttgaaccatcatatgttgaggtcagctctaaataggatttgttcagtgatgactttcagtcccagttcatggtgttccaagtgcgttttgtcctttctggattctaaatagtacttaactcatcatcctcaatcatgttggattcatttccctgtttccttcctcttaaccttgctttgcatttctgtttagtaataccccaatttttagtccatttccttctgaagaatatgaacaaggctattaatggaatttctattagtataggaataaagatgacacttaatctatggagatgttcaatttaaggcagagaggggaactacaccagaagcgacctggataattacaatagcttgggactgcaagaacatttgcagattgctggtaaagtggaatgaaattgtcactttaggtttttaacaaaaaagcaagagcctgctatctttatatcttcctcacttgtgaagtttgcattttctttgactaccggtcttgtgatgcctgtgcatacacatctggaggccacgaaaaactaacaccaggtgcagggtgccttctttgtattccagtattgctcattataaaatgttttgatgactcattaaaatggagtattagcactgatatagttattgtacaatagagtaaagcttacattctgccacttccactttccatacccatcccagaaattgcaaaaatagaacgccaagcttatttgttacagaacagaaaaatagacagctgttcagagttaataatggcagtcctcttccatgtagcaaaccaaaatttaaaaatatatacacattaaaatctgaaaagctttaatgagctaatactagatatgccatagtttttgaagcttcatttagatatttttatttagcragaagatgcttaggagcaatgggaattctcattttcatcatgtagagttgaaaaaattacaccaatgtttttactcttgctgctgctgctgctaagactacctctactactactactactacctatcttccttatatttatttatcttgttacaattttcaaagtagtataaactagattacttctcgttacaactttcacaattaggcaagacgagttttatcrtcttcatagtagttatatgaaaattaaagcttagaaagttgaaatggccaggatcagaaatggttaaacagtaagacataatgtagtaggactaaaatccgagttcagtttttattctgattcagaatttcagctacttgaaggatccttcttccaccatttgctatcttgggtaaattactcaaattctctgagcctaagtttcatccaatgtaaaattagatgttatatataactttttagcatkgttcgaagtctaacaaaatcatgtgaattgaactcttaacacagtgcctgacccaaaagtgtgcctggtaaaggttgttattactgttgctgcaaatttttaaatattwtcccaawtatatacatttacaaattgcataatgtcctcatatatggctacatttgcttcttgaagaaccacatgatattgatgaaataataacttttaacatctatacatgaatagaaattttcagagagattaaattaattagctaagaccattgcagaagtgaggagaaagatcttaaatcccagacagataatccaagttctaaactcttttattactacttttatgatattcaaaattagactagtattaaaatcaggaatcatacgattctcattatagttgtatataaccttagaaataattcagagagttaagtgacttgactaagttctacagggccacagccagtcctagaagcctcgtctgctaaatccaagtgcaggactagaagatgctcatcctatgacataaaagcataagatacaaatgttcttatccagtaacggtgggtgaggagcagtcacgagatgattgcaaatatattcataaggaagttatcatctcctttctagttggttaggaaaaacctttataaaacaaatgaaggttccagagtacctgagattacaattccaatggaaaaaggagtctgagagcacagaagagagagtcccagcctgggaatcatcatttcactctccaacttgtgacagagtccccacataccagaaaacaacctactccctgtgctccttctctttcattcttttttcttgttatttccccatctctcctctagcccacagcaacagataatattcctccttctttatgttaaacacacagttgtagcattatgccaggcctactaggaggtaaactgaacaagcagtatccttgctttatagaataatttaaagtaagaaagccaccagaaaactgagaaagcaagagtaacatagacactgccactgtgggaagctagaacagctgtggggctaggaactggttggcattttggatccagagatttgtaggctcttggcttggagaacaaagacttcattgcctagttgatgacaatatasaaacacatctgcagagtatattctttggcatcagcaaatgccagcagtatttagtgaacctctatgtttctagtccccattcacgtctcctttttatctgttatttttctccatgtttttcctcattggaaatgtttccaaattgaacattaattttgaagaaaaatgggttgaggggagattcttagacttacagatgttatgagaatttaaaataagggaaaatgaaactaaaatatcctgtaccctgttcgtcttgtaatgagcgcccaagtgccattgtttagaaacaagtcttggaacatcctccaggcccaccataaacataagcacattacagattactgatggataacagcaaactaaaactcatacttcatctttgcctctctccctaaaatttcttctcacacaaaagaatcattctagatataaaatattttaagactttctgtatagcytcacctgttatgtttcaaatcttagtgtatgatctagtgtcaaattatggtgagtaggggaaaaatgaaggcagagggattttttttctggagttataccttatagaaaatggatagaggcaataatggaagaaagagcttggtaataattctcagcttcacttcaaatcttttttactctttatatagaagagaactccttgctgctgattacatagttcttaggccagaaaattaacctgtttacaagaaaaacaaaatatgaactatgaacatagaacaacaggaccatatatagatttttgaggtgccttgtctaaggcatacaggacattatgcttcagccaagtcattagaaaccaatttctataattgttccttatcaaatttaacttttgtcttttatttctgcatgcttttcttaatgtcctgtctcctaactttctatgtctgagtggtaaaaacagagatcatttcccagaatgaaaagttatacagcatccttgctttctttacagtatttcctagcaggatgaactttgcaagagtaaaattagatccttgatgagaagtggactttcagaagccatttccctctttattccttaaaaaataaaactaactggggagactcagtaaactgctgaattacttaacttactgggtctgaaactaagatctcctgactccctagttctgccatctttatattaggaacataattccttgactggagtgtggttatttccagggagacagagtgcctgattttttatagccatgcaggaaccacctgggttgtcaggttgattccattatcaatgactcaaaactttatgtttctattaaaaataggaacactatgcagccataaaaaggaatgaattaacagcatttgcagtgacctggatgagacagtagactattattctatgtgaagctactcagaaacggaaaaccaaacattgtatgttctcactgatatgtgggagctaagctctgaggatgcaaaggcctaagartgttgcagtggactttggggatttgaggggaagagtgaaagggggtcaggggatagaagactacaaatatggtgcagtgtatactgctcgagtgatgcgtgcacgaaaatctcacaaatcaccactaaagaacttacttgtgtaaccaaataccacctgtaccccaataacttatgaaaaaaaagatgattatggagtaaaggatgaaaattgcattcatttttaatataagacatgaggctttgaataaatgtctagttttgggtaagtctttggggatatattctcacattttatctggaaagtttgagaaatgctgtagatgtcattttgctttgtcgtgatttttgagttcttagttttttctccaaatcccatacttcctcccacctaacttctcctgaaatgtacagtggaataataagttagaacaagtaacactgccagcagctaccatccttgttccatgcagggtaatggtaagacaagaatatggatttggagtcaagaggagtgagccttggctccatctggttattagtctggtgatcttgggtaagttgtgttacaggtccatgcctcactttccttatctataagataatcataattggaatatgtacttcatagggttgcaatgaggaatagggaagaataagcacaaagtaccagtgtataattagcatagaggagtctttctgtttataattttccttaattttcatgctctgcagtgaatagcatggtctggagtgcatgacaggctccagatgctcacacatggacaccatcaagcagtgtggtataagagctcatcaccagagggcagcatgcagttacccctttctacccattgtatctaattctgttgccccaagagtttctcatgaattgtaactcctattgctgtggctctagtccaataggtctaaaaatcaattaacaattactgtttgagtgtttgagtgtgtgttgtatgcccagcactgttaggagtgtaggtggagtggctgatgaagaaatagagaggaggaccctgacttcaaaatgattacaatttctgcacggagacatgaatatcacacatgaaccaattagctatcaacatgtataaaaatataaagaaatattcattcagaatgtcagggtttagtgctttcacataacttatttcctttaatatttaaaattcagtgtgatctgaagtaatacaaataatgagtgctttaaaatgtggggaataggatgtatagattgagtcctggagtgatgatggggaaagtatcatgaagcatctggaactttagattgtccttgcaggatggaaagaatttggttagagagataagattgaggactgcaactgatttaggatgtaggaaaaggaagaaatgaaaacaaagacattgcggtaggcatgagcaaggtatgtgcttggagtagtaaggatccttgcctggtgggaggaaaagagagaagaaggatggaaactaaatagcaataatttagtgatcccacattgtgtataaaaccattatccatgtactacagaagaaataagccctaccttaacctaaagaaccaggttattggcagcttgctctgaattctggcacctaaatctggataatacaactgtactgctaagattatagctctttagtagcttagcaacgaggaacagatggtatccacatggatctttccaggaatagcaccacatagagtgaatcagtgaattaagtaggtatggttattatggcatggggcacattgactaaaccacatttgagatttgagctattgactccattttttgtgggatcttcagaaatcatttgcataaataaagcagatttgtaaaagctcggtgtgagtcagtggggtttgaggcattatggcctaatggtgaaaagcaaagggcttagagtcagaacacctgggtttgaatctcagttttgcttccttctagccatctgacattttgagaaattcacagaatcattctgtgcctctgtttacttctctatagacaagagaaagttccgtcaatccttctggggttctgtaaggagtaaacaataaaacacaagtaaaaagcttaccatatttgcttggcacacagtaggtagttggttaatcaatgttagttccctttcctctcactatggaaattaaatgattgaatgtgtgtgatatactttatatagcatgacattggtggttgatataattgccaatttgtgtttcagtgttgatctgtagatgtagttttagtgagtaatttattttagccttttatactaagtgtaagtacgtatatggcgagcatgcaggatggagatctgaagaatcttcatactaacagttcaagcaatccccatttcttcatccaaataggattgattctagaaaaaacttataaagtgaagaaaattctgtttggcatggggcacattgactaaaccacatttgagatttgagctaatgactcaatttttttgtgggatctactggtctctactttctgtgcttcattctccaggctgctccatcatttctgcactagaaaaaaaagggaagaccaactcagcctatctgaggtctttaggatattcataggatattcatttattttctgcaaaatattttactactttgtattttaaaggaggatcaaacagagatggtaactctccagtccaaggggataaaaaatactaatggtgagtkttcaaggataagtaagacaaattgtgttgactagaacagactttacttatcaaatcttaatagggtgcagaagcaaatgtattgcagtggttaggatttatccactttggagccaggctaccgttgtctgactcttggtcctgctattaccagctgaatgaccttgggcgagttacttactgttattagttttgttatctgaaagtgagggtaatattatttttattattaagagttcaggcaagcagagtcaaattgatttcaagccaaaacatgaatcttccatcctgctaccttgttttctgagctaggctggtgttaagctaggtaggtaaccatccaggcattttattaaatgctagggaaagggaccacaatcttagcttcctccaaagttgcttcctttagacatcctgacacagtctgcaggatgaactagccamgccctcaggcactcacatagtttattcagcactgttcgtgtctcagtaagtccagcggtcttatgtctccgtagagcaggggcaaagcaggtgacaagccaaagccactggatgatattagtagtgatgacttagagctgggctggattgaactgcacccacctagttgtcttgtagagaaggaacttaaaaggagaagaaaatctaggaaagcaaaaagtaaaaactaatctcagtaataagtataataacctaagaaccttttttttttttttttycgagacacagtctccccaggctggagtacagtggcacagtctcagctcactgccacctccacctccaggggttccagccattctcctgcctcagcctcccaagtagctgggttacaggcacccacccccatgcccggctaatttttgtatctttagtagagacagggtttcaccctgttggccaggctggtctcaaactcctgacttcaagtgatctgcctggcttggcatcccgaagcactgggattacagtcatgatccactgttcctggcctacacatgcattctttattcagctaaattcttgagaaataggttaactggaaaatagcactgtcccatttttaagtgggggtttgcaagacattaagggacccagaaacctctgataactggggaattgaatctaagtcagaacggtgataaatttctcttcagactgtaaaagagaaactaacaagtttccaggcagaaaataattgcattttcagtctggtcgcctagaaaaactcaggcaaaaaaaatcaaatgttggagttaccattatggactctggggttagaaagacatgggtttaaaaactgcttgtggcacctcttagatttgtgaccttaggcaagtgacttgctcagttgggatcttcttttcttcctttcttctctcctttctttctttcattccttccttctttttaatgggaacaataatgttttccttagaacattgtaaaaattaaatgcattcatatatcttaaagtacttatagcattactgaaacataataagcaccttatatatgcttaatactttattattgttattcttgttaacctcagttttgatactatgtaattgtgagatctgggttatgtcatattctttgtattcattttcatatttatagaatgtaagagtgtaattaaaggttccttaagatctcagctttaaaagttctatgattctagaatatatttgttcttcctattttgttcttcctctcttacacaaccatcgatgtgtctttaatcagtcaattacccatttatttggggcttgctcaaagaatgcctgaatcagtcagcctgggtatgctggggccatcagccttttcctaggcatgcctcctacaggcctcttcttatgacacactgggcctcagcaactacaccagaggaaggaggggaaggttcttgggccagccaagatcaaggcacattaaataaatttagatttgaactggcttgtaacttgttgatcaacagcaaaaattaggatctggctgggtgcggtggcccacacctgtaatcccagcatctggggaggctgaggcaggtggatcacttgagtctaggagttcgagaccagcctgggmagtatagcaaaaccccgtctctataaaaaatacaaaaattagccaggcatggtggtacatgcctgcagtcccagctacttgggagtctgagatgggaggatggcttgagcttgggaggcaraggttgtggtaagccaagatgggactactgcactccagcctgcatgacaaggtaagatcctatctcaaaaaaaaaaaaaaaaaaaaaaaaatccagagataactggtgaaatctgttttcattctaaggggcagtagaacatggctctggagccagattgcttgggtttgaagatttaccagctatttaccagctgtgtgactttgagaaagttatttaacctctgtttcctcagctctactttgagaataacagtgtttgtctcatagaattgtgtgaggattaaataagttaattcacataaagtatttgctatataagtacatacwcttattattatctgtcccagtattaatatatcaggggatttaggtgtggcagggtcataatactacaaaccttcaggtagtgataattgtaggttccaagtaaatcctccaaataggagtagggtcctactagcacctagagatgtggaactccagcctaaaagattgtggaaaagaaggagaggaaagacagagtttcgttccaatggagaactaaaatgtaattcaggaaatgaaggcggaagtcactcccccaaccatgccacattttttttttccagagtaagccaacataatagagggttatgggggaaaatctaatacacaatacagttatcctgtgttcaacactcagcatatctaatccggtacttaatgttagatgtcttacttcaaagttgatggggtatgtgcatagtaaccccaatattctacttccctagccaggattagcatatggtctgactggggctcatcccratggaaatcttctgtgtgaattgtgaagcaaaaagtttgctagcatgctatcttgtagctgccagtctaaaacagctaatatttaccttgaggttctgggatctccacctctcataatgaaatcacacacatacacatgcacacacatacacccacrtacaggactcattttcaaactttcagtggcttccattttgtttcaaaatgtcatgccataccatatataaaagtcatttatagggcctgtgtccctctaaatagacaagaaatcttgcccactcagtaatcctgtcctgtaaggctgataagataagccaaaggtatccaaaaacagctcatatgttattcttgcactattttaccacctatttaaattggcgtaatgacratcacctgccttccatttgcatgtcccgggtcagctgaaatccctgcatagttcctagtaccatgagtgttactgttaatttcttgctgatctagttctctccttttctaccttgcttcttaaaagtctaggtactagattaagtcttttgaccttcccactgattagcctacacttctcggagctaagctacatgagagtgtttcttggctgactagctactctacatttcctgccaataccttgcttgaggaggcttcttcaccatagttggcttcatgaccacctgtccacatatgtcagaggcatttcccatatctgacacttaacacatatcaaaaggtaaccacattagtcagaatcaatgaactcctttgtaaagttgcattcattttgtcagattattttttatttagagtctcttggaagcaagcaaaaaaaaaagtgtatctattactagtataaacaaaattgttcatgtaatctgagaacatttgtatgtcacatgaagcccaaggataggaaggtggctgacattcattaataacttgatctatcatttaaattatatcagtattccttctgcttgcttcttgcttctctgtaattagctgtactagtcccttatgctgaaaactggctttctgtgcatgaaagagaatgtcatgtaaaaggcaaacaacacaaaaaaaggcttcatagtttggtttacttaagaaagaatttttttttcttcatcccttatagtttcaaaaatcttgcctagatgtatataaagataaatcttgaattttctgattaaagaaagattttgttctagatttttcataaatctccttccagttaatggaaaaaagcatattaaagaaggacactagaatctgctgagtcaccagtttgatttaggcatccaattaaagaggatatccaaaaggaagaaagagagtgtatggccggacgtggtggctcacacctgtactcccagcgctttgggggccgaggcgtgtggatcacatgaggtcaggagtttgagaccagcctgggcaacctggcaaaactgcatctctactaaaaatacaaaaattagccaggcgtggtggcaggtgcctgtaatcccagctacttgggaggctgaggcagaagaatcacttgaacctggaaggtgaagtttgcagtgagccgagattgcaccactgtactccagcctgggtgatagagcgagaccccatctcaaaaataataataaaataaagagggtgtatatggcagggcagtgtgaaatgtggagaaaatacttggtgggaactatcaaagcaagtggatagttggtttttaggactcagaaacaaactagatcaaactagtcatagcctctcttgactgtaaaagtgaacaaagaatcaggagccagatgagctaaaggaagatttggaattaccaactggtgagaagagcacactcataggccatgctcagaattcatctatgctctgtgtagtctggggtgggctgtgaaggtcctggagcagggcagtgggagagtcttcagagagcctggtgtagcagcacagtggggtagtgtgtcattcagaagagcctaccgtggcatctctttggcagtcacaccagggcgttaccaatgtcaggtgtatgtgatatatgtttatttttacacaatcttgtttgttcatgcatttttaatgacttttagagaggtaggtgttagcagtggcttctggatccctttggcaccaagaaggaataataaactttccatataacatagattccacataacatagatcttatccttcaaattcttgtcctctacttcaagtggagtccattcacagactctacatcctagagttatgaaattattaattattattttataaaagctgaatttagttaagtaatagtaactaaacaaagaaagaaagtgatattggatattggaaaagtagtcacagtcttggtatcatgagattttggggttccagttctttagaagtgctttacaaagctcgtaaagatatattactttcctttatacctacttctatactttatcactacctttagtcaataaattctaagtatttctcagtattctttgagctccttctgtatacccaagtgctgtggagaattctagaaaagtatacaatacttgccaatttttagacatacagtcttcttggaaagactaaatttacattaaaaaatgaaaaatagcaacataaacatacaaaagttttaaatggcattacataggaaataggcgtatgtataaaatttattcccataacacattattataatctgtaagaaaaaaagcaaagatgggatgaaagccccaaataaaattaatacctatttattaatcaaagctatactagaaaatatggggaaatacaagaattacatgtgatattcagagagttttcagtctattcttggatatgaggcacacttttgtgagtcatggaaaccaaacagaaagcataggagagatgtcatcaaaactaaaaacctttttaaaaatacatactaaggcttcaccagactgtgttcaacgtctaacctgcaatatccttaggcatcttttgccttcagggtggtctttgctttgtctagttcttgtatggtactctagtatagggctgacatatcactgcaagactcttgtgatagaaccacctagatactgggattatgaagcagcttagtggggaaaaatgaattttgaggtcagaaaaaacaatattcaaatgtcaaatctcattttcactgagcctcattttcctcatatataacatagaaatagtgataataatgcctcatcagtaaggttttgtggagattaaatgaggatatatatgcttatgtatatatttaataaatggtaatacatacttaataagcagtaattattgttattattgcctttgacatgagctgttttagaaccacaatctaaacaggcctcttattagtgcagttgtagccaccaacatagcattgagatctctgcagtgtaaacagtttacaagccatccaataatatatctttacagtagtctatcttaagagacacttactactaataatatttaacattaattctgaaatgtactgtttaccaagcacactcaactatatcacctcatttgatcttcaacctttttggaaagttgttactactattcccattctacacggaaggaaaattaatcagagagggttagtggacttgccctaagatcacaccactaggaagtcactgagcccccaaatcatacaatcagaaagttgctaaaccaaccttgagcccatgtcttctgactgcagacctcatacctttttctcttctctacatgcctcttattatttttttttaatgagatccagtaaaaactgtctttctccagagtctttatttacccacaagatacgtcccattgagaatcatgaaaatattatgactaactagttgatccattatatacatatgtatgccaaggktatgttttccatgcccagtgtttttggtaaagacatgaaattttgttttgtaaaacctgctggattgctatttgttttatcatttgattaggattccacagaatagattgacattaaaaagctgttaactctgttaactccagagggcacagctaatgaaataccccaaaatttgagcactttccaaaaccaccatgtcgtatagaagagttctctattaatcaagatgaaagtatgtcctttatctaaatgaaatctgtaatttgagacaaagatgaaagatcctttggaggataaagcaaaagttgttgtgaaaattctagaaactaaaaagtaaagatagctctactcaatattcatgaagttagactggtgatgcaaatagagattgcaatctcttattttctagtgatttgccttgtagcactcctgtatcagttttacacagattcccgctaaactttaaagagaattactgcaaatcgtacaatttttttaaaaaaaagaaagttgaacatatccaatatgattttctgtcatatttgactgtcaatgttctatctagggatttagaggtttatgattagaggtgcataaataataaaatatggcagggcatgcttgttcacgcctgtattgggaggctgaggcgggcgaatcacgaggtcaggagttgagagcagcctggtcaatatggtgaaaccccgtctgtactaaaaatacaaaaattagctgggcatggtggcacatgcctgtagttccagctactcgggaggatgagacagaagaatcgttgaactggggaggcagaggttgcagtgacccgagtttgcaccactgcacactccagcatgggcgacagaggaacacttcatctcaaaaaaaaaaaaaaaaaaaaaaaaaaagaaagaaagaaaatacaggatacagcacgcataatgtgtaaacgtagatgttgataagtgaagcctttttgtattgaatatagcatactctcaaaaggcagtttgaagagaataactatgaatattggtttaggtttaattttgcttccttgagagagaaatcaaattcctttagcaaagtcatttcataaagaaatgatacaggtcgagtgcggtagctcatgcctataatcccagcactttgggagtccgaggtgggtagatcacaaggtcaggagatcaagaccatcctggccaatgtgggaaaccccgtctctactaaaaatacagcagttagctgggtgtggcggtgtgtgcctgtagtcgtagctacttgggaggctgaggcaggagaattgcctgaaccaggaggcggaggctgagtgagccgagattgcaccactgcactccagcctgggtgacagagcgagattcttgtctcacaaaaaaaaaaaaaaaagaaagaaaagatacaagttttaactcttacccaatttattagaaatccttgccttacacatagcagaaatcctcacctcctgcattgttttgtagaatgtaagagaaaatgaatgtaaattatatgaatgcttacttaatttctttatgtggtaaatgtaacaaatatttgagttgggggaaggtacagaaactcttagtcattttatttaccctactaacacttgacacggtgcctgtagaggtcctcaagaaatgcctgttgagctctttgttaaataagttaacagaaataatctgtctcagaatacactattcattatttaattttttttctatttcttttttcaggccagtcctgctcctataattgtcaacacagatactttggacacaattccttatgtaagtaactttttcattactaccttcttytaaaactgtggtagaacttaattggctgaatttaaattcaattcacatttagtttcacccaaactaaataatcttatggaatgacatgtagttttgtaaattttcttttaataatttctaaatcttgtcttagtcatcaaatatttccctctttcattcatgttttgtaaaacacaagggcccattatgaaacaaaaataaacaacgctgtttaaatagtgttagtttgctaagtggctcactgaaaagagactgaattgctcatagacactagcaaacttctttgggtttcttataaaaggaatattcaagtcaatttctgtgatagtctggaacctaaagtaagtaatcaataaatatttttatggattttattgggcttctaataagaagtggccaaaagtttcgtgagggtagagcctatctatatataatgaaagttatggttttatgaaagcatgagcatgagataataggatcaagcaaaccaatgaagcctaggattctgtacctgtaacacaaccactatgatggcaaaagttcttgaagatagagtctggctgggcagggaagattggagaccagctatasgccacaatgtgggtgagtggttgacattatggaggtccaacaaggctttgtgagtgggcgctagctgatgagtggaggatagtgatcaaacaagatgggatagccacagatgcatgctagacagggggtatgaagctgagaagaagggctacaagggtaatggacaacaacaaacagattcctggcctttgattaaatgagtaaaacacagaaagcactyagaacagtacctagcacaaagtaagtgcttggtaagtactggctcttctcagttttagcccacagcctcaaatcccttcaatgaccaagcaaatcacagaaacaaatggagcagtcagagtggggcctgtggggaatagaaagcacatggccatttaaagagagcaactgccacttggaatccactggtgccagatcattttacaaaataagatggaaatttgtacatgtttgcaatttctaaatacaggcaactaattttcaaaagtgcaaacactgtgtctgccaaacaaagtgtgtctagtccataggctgccttttgagagatgttacctcaaatacctcaaaagaactggcggtcctgagcaggttctggcggtcctgagcaggttctgcaatccgggactcagccacaggggagcagaatgtcagaactggagtacaaggttgggacttgattataagaatgaggaactaaaactgggacacagggtcaggacaagaataacagcaagcttgacttaatgctgaatcacctgaactactgaactagggcttcttaaatctttctgaacaagaatagtttgggaccagaccggaaacaaggttaggcttactggaaggagccaagagaccccaacactggaaagtaaagggctctgtagaagcaaacaaagcaatgtcttaaaggtacctacatccactattctcttactcttcctacctttctttacttaccaaacttctgtaacagtgtatgcctaacactgctgtaggcacttaacaaattttaactcatttaatcctcataacaatcctatgaggtaggtactattaatttctctatttttacacttgggaaaaaatgagtcataaagaggtcaagtaactggttcaaggactcacagtaagaggcagagtcaagagtcaatccagatagcttggctgtagagttagaagtcttatttaatttctaacatgctgttacctgtgtttctttcttccctcccttgttttctgcctgtcagcttgggaacatagtttccttacttactcccctgatacatgcagatttggatgagagataacttgtcacagaagcttcaatatattcaggacagggatccatttatatatgaaggaatcctatgtcccaaaaaatctcttcactatagccattgtcaaagcatgtaagcagtgctctcaagaagtaggcctggagcacagagagctgattttgtaagtaagaccactttcttgtggtggatctaaattatttcaaagcctcctattagggttctggtggcgtaactgccagatatcctcatgtagaaataatttatcagtaagatctaagggtcttttgtagacatgttcaattggtatcccaaatgattagctagtaaaatgagtcgcaaataacaaattcatcaaaattcttcccattcttccaaataccaggtttgtatctgactttgagtccttcaaaaattatttttaatcatcttttttgttgttgctgttgagacagagtcttgctctatcacccaggctggagtacaaatggctggagcctgatcttggctcactgcaacctctgcctcccaggttcaagtgactctcttgcctcagcctcccgagtagctgggactacaggagtgcaccaccatgcctggctaatttttttttgttttttgtattttttagtagagacgagtttttgccatgttggccaggctgatcttgaacttctgatctcagtgatctgcccacctcggcctcccaaagtgctgggattacgagtgtaagccactattcctggcctaatcaactttttcatacttaatgtaacccactttgtgcttccttaagggtaaggatctttatagtggtttgtgaggagcttgatatgatgaaaatggcccaattatcatggtagtatgttcttaagtaatttatttaatctctatgcacctaaattaacctataagagaggacttataatacctgcctcagagattttcttagcttctggttgatagcagctaaagtatttatcatttttttgaaaaaaaaaataaacacttatgaggtaaaacatgctaaattctaggagaatggtaaatatgaataccttccccgatgtagaaaaaacatgaatacattatgtattgaaaatggcagatttagtgcatactcattaatgtggataagctttggttcttggcagagtcccaactctcccctttgttcctgactcacggggtaaccttgaacaaattactgttcctttcacagtctattttctcattccccagtgttctatactttgttttcctcttttcttcctcatgttctagttgttcacataatttcagctctatttaatgaraaaacgatttcagagttccctagggcattttagtcatgttgcgtaagaacatttccttcttaaaaatattatcagaatgccaagctttaacatatattaaagtctttctaaaaaataatttcattgcaagtaaatgtattaattttgctaattagcaaatttgatttttgatagaaatggttcttgtgaaaatggttccttggcacaaatgcaaatgacaattgaatagctacaggaaatttctagggccaaagggaatttttatgtaagtgtcaaacaaaagtacaaaatatatttaaagagacttctttttattaaggaaggtaagttaagagacattagagcttgcattaatgaaggggtcactgaggttcttacatgaaaatgccttaagtaagctctgtcttatatgaggtcatgatatattagggttgggtatgaccttaaatgtgacatagtctagcttctcatgcaaagcaggaatccctatatgaaaattaaaatcacccaagcagaaacaaggaaagatatttttccacttcaatactctctagtttctattttttgctcaatatttttattcttccccattacatgttgaatagtgtttcatgccaggtactgaaagtactttgttcttagggagctcagagtgattagagcctgcttgtgaatccagttccctgaaggttgactcagycaaataataatgctttactctctggtactctgcaaccaactgacattgcrctctcctctcctttcagcagacactttagagttcaatattgaacagcaccctaacaaatagtattctttatgctttagaaaataaaattagagagattctagaatgcttttttattttgctctaaccttctctaatattctttttatattttggtaatattctgacctctttgatagaaatgcactgttgagagaggtatacttgagaatcatgagttttccatcttgttaaatatcttggagttcaatgaacacaaacctttcattttaaagatatggattttctatctcaactagtaaatggtagtgcttgatctaccatttactgttacctcatgtaattgccaatttttggtgtgtaaccacaaccaaaaaaaaatcagcggcaataagcatttttttcttctctatcagttagctaggacagctgcttcaggctgcagaatacagtagtctcaccttatccatggatgacacattccaaatctcctggtggatgcctgaagctgcagataatgccaaatcctatatacatgaattttccatcttaactatcaggcactgtggccataacttttgcagtttggggtgccacagcaaaactaacatgattatatttttccttcttcacaatatcatggatgaaagattcatttttactatagatcttagcagcttcatcatacaatgctgtctcttttcttttttcttaagtcaggaattttcaagttttcccttaaaggraacactttagggcttctcttaagcatttctgaattgtcagcatcactattcttgtgctttggggccattattaagtaaaataagagttacttgaacacagaaactactataccaggatagtcaatttgatcacccagacagctaataagtgaataaagggcaggtaacatctgcagcacagataccctaaacaaagaaataactcacatcctggaagagatggagtgggacagtgagagatttcatcatactactcagaatagaaagcaatttgcaacttatgaattgtttatttctggaattctccatttaatattttcagacaatggttgacagtagataactgaaactgcagaatgtgaaaccacgaataagtgggtgagtggggtgccattgtaccaggttggctggggcatctctgctwcagaagtttcattctggggaccaggaggtgggacagtagctatccagggtatgttttcatattgtgatagtcaaaggacaagaaatcaagcccgtgacacaaacacagttaaagcttctgctcaccttacatccaccaacacccaattggccagaataagtcatgttgccaagctcgaattaggggaagagtgagtatttgctaaacaataaactagtacatcagggccttaaataaagggctgagaatctgtgtatgtccctttatgagaataaaaaataaaaacaaagcagatataaaagaaaaaatcttgtactttatattgtaggtcaatggcactaaacaaagtgtcagagggacctggttcaactgatagggagagtgaatgtgtagattattgtatgttgtctaagggcaaacactgagaagtaaaagaaacatctagcaagtactggcagtacaatgcctttactttcctataagacactttgttgctgaaattttgtttctagaggtagaaataatagtggagacaagggagaagtttcaggtctcttgcttggaaaaccctcctaggaaagtaagggagagagaaaagtagaagaaaaagagaacacaaataagagttaggttatgaagaatatgagtgggtccttagtagtatatcccccattggatttggctgccaagaaagttatttatgtaaaagttatttgtggacaattataatatcatataatatcagcaacatttttacagagtgctttcaatgtgaaaaggccattggatgcaaacaaaactatgattctggggccaaggacaagagagtgaactaaagggaaaaagatgaaccaaaaaaaaggctgaacacatgagtgtcagtgacaagaaaaaggatactatgggttcagtgacatagagacacaattgaattagcaatgagcttcactcaggagccagagaatgggtttgtgtctaagagatgttttaagtaacatttaaatggcactgctgattgataccagcatcaggaagctgaggacaagagctctctgagaaggaagttgccatattacagaagtgaggtgaccaagcacttgttgtaggtctgtacatttagacattaatttatttgagtgtaaataacatattcttatgatttaggctatgattcacttttgattggaccattttccataattgcctctgatgggaaagaaaggagaaatatgtgtgttcctttgaaccatcctggcagtgattaataatggtatgatattttggaagaatttgctgattttagtacatttatctttcaacaaacatgctttcttctttttgtggtttttcccatggacattgttaaaactatattgttaatgttttcatctattgggaatgcagttccaaattttaaaatccttacttaccaggaaacagctttattttgtctcaactactcctatgaagcaataggaatttagcaatagaggcaaagctgtcaatatttgctctggtgtcaaacctagccaatctaaattcatttctcaactgccacaatcagcagaatccctactcttaactgcttgttgctttgctttataagcaagaggtgggctcacgcctgtaatcccagcactttgggaggccgaggcgggtggatcaactgaggtcaggagtttgagactagcctggccgacatgctgaaaccctgtctctactaaaaatagaaaaaaattacccaggtgtggtggtgggcrcctgtaatcccagctgcttgggaggctgagacaagagaatcacttgaacccgggaggcggaggttgcaatgagctgagattgtgccactgcactcccaccctgggtgagagagtgagactccacctcagggaaaaaaaaaagaaaatgaagtttctgattcactaggtctgggatgcgtcagtctgcatttctaataagttgccaggtgaggttgatgctgcttagttgtacatcatactttgagtaacaaaagagtataaagagagaaactagcctttggctttatgcacgactgggttgtaaacccacctctgccagttagttcttttcttgagttttggttaagtcacatcacctctctaagcctctgtttcattatatataaaataggaataatactacctgccttgcaggggttgttatgaatactcatcctagtatgcagaaggggcttaatgaatattcatcgtgagactgggggtaaggtgggtgtatctatgataaaataaaacatttctctgactgaatcttgaactggtgagtcaaaatgagaagccactgctagttcaggagttgggccagtagcagttacataggtccatggcttacctacatctagacctttgctgctcagagtgtgacccayggactaacagcagtgatattacctgggagtttgtgagcaatagaatctaaagttccaccaaagacctactaaatcagaaactatgttttaaaataaaaacttcagtgatttgtatgcatatttaagtttgagaaacactgctcaataagaaacttattttttggtttggatcctgatgttttgttccttcactacatgttttggcctgcagttgagatagctaccattttctaactcttttactttaaacatatacacatctataaggaaagagctctatttattcaacaaattgaacacactatgaacaactactatgttgtcctactttctagacctttgctttccaaaaaagtagttataaktcacatatggttatttaaatttaattaaaataaaataatacaaaattacaaattcattcctcagttgcactagccacatttcaagtgcttagtagccagtagggctaatgggtattgtattaaacaatgcagatatggaattgtccattattccagaaagttctatcagacagagctgttgtaggcaatacataataagaaagaaatagaagagataagggagctaatttgttatcaagaaatgattatactctaggttctttatatgtgagagtgtatatatatatatatatatakagagagagagagagagagagagagagagaacctaattaatcatcaaaactatccttccaatttttgtgtgttggtttaatttcctccttttttaagttgactattttcaaatcttctaaatagtcagcactctccaggaattgtgggatatgctcacatggagacatgatccctgttctcatggctcttaaaagcttaactttgaagactcttaaacatgatacacatggaggcaaatgtcagcaattactgaaagctttcttaaaagttcagtgattcatcattttcttattgtaaaattataaaattcctattttggccaggtgcggtggctcacgcctgtaatcccagcattatgggaggccraggtgggcaaattacctgaggttagaagttcgagaccagcctggccaacatggtgaaaccgtgtctctaataaaaatacaaaaattagccgggcacagtggcagacacctgtaatcccagctacttgggaggctgaggcaggagaatcagttgaacctgggaggcagcagttgcagtgagccgggatcatgccattgcactccagcctgggtgacagagcaagactccatttcaaaaaaaaaaaaagttctatttagattgggatgattttttaaaagccaagtcaaaacaaaaacaaaaacaaaaaaaaaccaacagaagacctgacctacttaccattcacaaactaattcactttttttgccttgcattacccttgcagagggcagtttgttgactactgtactcatagcttctcatttactgggaagcccttacttaggcttgtcattttggatttagagccaacgggaaaataaaacggttgtccaagtgaagaatgtgactgttatgtgaaagtagcaatattggcccgtctttcttagaggggttcccctaaaagccttacctacctggacagagaaaccactcttattccaagaagtgtaacctagcagagcacttttaagaacaagggggaaataatcctgaaaaatatttgtgtagcttctcaagcataaagctgctcaaggtgcagtctgtgaactggcagcgtcaggtctcacaggtcaggttgttagaatcgtgggatctccagctcctccccaaagctatagaatcagaatctctgagagtggaaccaaaaaatttgttcttaaaagtacctcaggtgattcttaggattgctgaagtttgagagatgctgctctacaatttacaagagatttttaaaagctagtgggagaccttaagcagctctagttgctaaactgaagtggaggtgaaagtaggaaatactgcatacaggaaggacaaaataaacatatctaaggcacaatgatcagacatttagcatgaatctgaatgagtgtttaatcctggtgggttttttttttcttctttttgaatcacttgggacctttaaacacattgtttcctagtctaatgaatagacatgttaatgaaaatggataatgcatggtgaaaagcacatgttgttaaacacgccttgcttatctctgcctggcttattcttacatatcctaaagggttcagcttaaatwatgcttcttctaggaaagtgagattcagggtagagttcctcttaggagcttccccgaaggctcttcttcctatcaaggtagttatcacactgaattgcagctatttcattaatagttgatctttctctctagaatgtaaacttcatgaagcacaaagaaaatattgctttatctttcccacagttatacctyagaaaccctgcacatttttactgactggtggaaggcaggcagacaggcaggaagggaagaaactacaataataagccatcctatttcaaggaatcagagaaagggagaattttgtctagctcttaaagaataaaaagacatttctaggcaaagtaggtaaaaggcattccaagaagagggaagtgcaagtacaaaggtcagagttcaggcaactcacatgtcctgagtttcatccatatggagcacagagcaatagcataatatgaggttgggttgagtctgattgtgaaggccttttttgcttggtatcggctttggactttaacatgtaggcattgctggtagcattatcttctcatatatttaggatattatgacatctgattttatcactctatttctaggtcttaatttttatctgctatattgtaggtgccctgaaacatattttgaataaagccaaagacttaatagtgatcacctaagaacaactgacacaagctcctcttgagccttttctacattttcctatatccttacctttgttcaccctgttcaattagtccacaatgccttttcctccattcccatcttttagatctcaataaactgccaccaccatcaggaagcctccatcaatccctccaggtcatattaatgtctccttcctccttgattccatagtatttcaatcatgggagattgttattttagtagaaagagaatggagtctgggctcttttgattcaaccatataccagctggataactaaaaaaattaacttctctgacccttttccctcagctgtaaggagagacaataaaaactaccttgcatattgtattctttaggagacaggttcagttacatataacagagaccaaaataatgatgtgtttgcaagataggmatgtatttctttcatatatgacagtccctaggttagctgtccagagctagaatgtctatgctgctccacaaggtcttaaaaggacccaagtaccttttattttcttttttaccacccttgggggttgcccttgcacaygtagtccaagaggcctaccaccatgctgacgtgctaaatagcaggttaaaagaagtacagagatggacattgttcrtccgtttaaagcaatgtctgaaaagttgtaagcatgatttttccctcatacctcaaagattaggcacaaagccattcctagatgcaaagggagactgagccatataacctttattctgagatgccctgggctcagataaaagtgagggatcccgttattatgggagaaaagggtaatgaatattggggagaagcagcggtttctaccacacaacatgttagtagtattcttcaatgtcggaagcttctgcccaggggatgctgaagcagatccatcaagtgctagcctttatagtttttcatcatttctaatttcaacattttatatataaaacactgtattgttgcaattgtatcagtatactatatctatacagactagcacatatcggggagcacgcttgcaaacattttactggtaggaacactaaaaaattttcagaaaccactggttgtaagcattggagataatatttagacattgcttggctcataatagatgttcaacaaatgatggccattggccattgttgcagtcctaaattagtatttaccatattcctctctatttattaataattcttagtacttgatattcaccagatacaattgtgctttacttatctttaaattccaggctgggcatggtgactcatgcctgtaatcccagcactttgggaggccgaggtgggaggatcacctgaggtcagggagttcaagagcagcctggccaaaatgrtgaaaccctgtctctggtaaaaatacaaaaattagctagctgtagtgatgcctgcttttaatctcagctactccggaggctgatgcatgagaatcacttgaacccagaaggttgaggttgcagtgagccgagatcacacccctacactscagcctggttgacagagacttggtctcaaataataataataataaaaatgataaaataaataaattccataaatagccatagtccatgcatgtagtgggatttcaataaaagtttttttcaatgttacactcaattgtttatttgaatttgactgttttaatagagtgaatttttatttgaaaagtaattcatcaggtaaatatgtgtgttttaatttaatctacatgatcatgtggatcaaygtgcatgtgaccacctaaaagtgggctgcccaatttattggctctttatagtttaacttgctcatagataagcaytcttttcaaagtgtggtcgtttacaaatgcttttttctttctcaaatatatatttgaaagaaaatgtaggcagtcatagatgatgacagggaagacagtggctagttgagtgaaaagaaagaggaagagtgacagttgagtaaaaatcaaggagaggaaatgagactggagtaataaagagaaatggcttaacatttttatgttactttcctcaattttaacagtgtaatatttggattgagctaaaaactctatttcaaaaaaaaaaaaagcaaatactaaaacatatttctggggccccaggaactttatgtgatgcttggggtaatttataacttcatctctcccttgttaaatcttgcttggcttttttttttttctttttcttttttgagacagggtctcactctgttgcctaggccagagtgcagtggtgccatcagggctcactgtagcctggacctcctgggctcaaacaatcctttcatctcagttcagcctcacaagtagctgggactacaggcgtgtgccaccacatccaggtaatttttgtatttttcatagacatagagttttgccatgttgcccaggctggtcttgaattcccaggctcaagcaatccgcacacctcrgcctctcaaagtattggaatgacaggtgtaagcctccatgcctggccttgctgggcttttaaattgactttttgacactgatattttttaggggccagttcctgagggataactataggtatttttctctgtgaaatcagacagctaccttgcagctaccttgtttcagtgactgacttccctctagtgtctttctttttcttttcttttctttcttttttttttttttttttttttaggcagagtcttgccctgtcgcccgggctggagtgcagtggtgtgatctctcggctcactgcaacctctgcctcccgggttcaagcgattctcttgcctcagcctcctgagtagctgggattacaggtgccccaccaccacacccggctaattttttctctttctttttagtaaagacagggtttcactgtgttggccaggctggtcttgaacgcttgacctcatgatccacctgcttcagcctcccaaagtgctgggattataggcataagccaccatgcccggctgtgtctttccttttctaagtgtatcatatctcagccctaaattacttcccctcagttgtcacttggaagttccaagtttgtttaaatacacgaagagctggatgaactttgatgaactttacttttggtgacaaagtatagtttcctcttcatgaacagcattaatrgaaatgcattttgattatcctaatttctaccaagtgccctaaatgatgttttgcccccaagtattttattttggaaactcagtagcataaaactgaaacattaccaatctaatgagctgtcacatgaaggaaaagtagtaatgaaataacaaattcagataggtcaaatggcatgctgagaggaacgaataaacaatagcgcatyataatcagtatctctttaaagacaatctcaggaaattttcgtggttttcttgtttttaaagcaaattgctaatacttttgctgatgtctcaaagcagtggctctcaaccttgcccccacattgtaattgcttcccgcttcaaaaatactgatgctgggctgggcacagtggctcacacctgtaatcccaggactttgggaggccgaggcaggcgaatcacgaggtcaggagatggagaccatcgtggacaacacagtgaaaccccgtctctactaaaaatacaaaaaattagccgggggtggtggcacgcgcctgtagtctcagctactcaggaggctgaggcaggggaatcgctggaacccgggaggcggaggttgcagtgagccgagatgatgccgctgcacactagcctgagtgacagagtgagactccatctcaaaaaaaaaaacaaaaaaaaaaacatactgatgcttcaaccccaggaataaagattcctgtttaatgggtctgagtctgggtataagaattgggatgttaaaaaatctctccaagtgataaataactaaataactaagttaaagcatctagttyttctaacctgctaacctactatgattctgggaaggccttccaacagaaatgggtggttgggktagtgtgcttattatataggcaataaactgagctgccacctgttaacttggtaacagacacagctactgctaagaaagctagctagctatgcaaggcacatgccctcaggctcagacttgatcaagttaatgaaacacccctccaagggttgttctgctgacacatgtcaccatttatgagttgtaattgggtttattaaaaarggagtcatggcctgtgctttagcagtttggcctaagggcccccaaaaatactgagagaagaaatttgcaagccaaactacagctgaaaactagactggggttgaccttgaggtaggttattgtagaacctgaggctcaatgtaagaaaaaaatcaaatatcaaaaccctgcccaagtccaccagaagctttctctgacaaccaacctcactgatatttccctgtctttgaatgtctattgcacatactttaagaaggacaatggccaaaagtttatttaactcaggtttattcgatggcagtttgatttaataaatttatgctttgatagtgaaattatctggattctttaaaatggaatgttattttggtatggccaagggcacagacttggcatctaagagaactaactctctcttttgtgaacttgaggaaattacttaagctctctgagccttagttgttttttttttttttttaataaaatggagaaaggtggaaatatctcacagtacagatatgaaaatgatctgaacaatgtcattgtaggaataaaaatagctattactgaaccatactctaggcactattaaaattttgtacatatgttaatttattcaatcttcacagtaaccatacaaagtatattattgttacttctataggtaagaagttgtaggcaaagagattaataacttatccaaggtcacacagcagatagtaaggggcttgtaataagaatagcattatactaccctgcctctcggtagttgtaataaaagttaatttgctaaattatttaacagactgaaggagacacttaaaagcaactaaggtccagcacagtgttgttgaacacttcattaataaaaggttgaagtgctacaaagagaaacacattgttcgagattgtggttgacaggaaatttgcragtatacatgttgtgaaagtttaaagtcaacctgggaagagatttttttttttaagacaggttctccctctgtcacctagactagagtacagtggtgctatcatgtctcactgcaacctcaagctcctgggctcaagtgatccttctgccttaggctctcaaagtgctgagaagagatctttaaaatgcagttagtgtcatcaaaaagggtcaaactctgtaaagtatttgaagagatttattctgaatcaaatatgaaacctacggccctcgatacagctccaggagaccctgagaacatgtgcccaagatggtcaggctacagtttggttttatacattttatggagacataagatatcaatcaatacatttgtttgttcagtccattggttcagtccaaaaaagtggaacaacttgaagagagtagggggtgggctttcagttggtaggtggattcaaagattttctgattggcattggttgaaagagtttatctaaagacctggaatgaatagaagggagtgcctgggttaaggtaagaggttgtggagaccaaggttcttattaggcaggtgaagcttccaggccgcaggcttcacagcgaataatagattgtaaatgtttcttatcaggctttaaaaggtgccagactcttagttaattctctcttggatcatgaaaaagtcctggaaaggggaggggattttctacagaatgtagattttccccataagagaaaactttgtgtggccatttcaaattatgtcaaataaatatattttggggtaagatgctttaatttctttcagggcctgctctctgtcatgttggtattttattactctaaatagtcagctttgtcagtcttctattrtaacgttaatgctggtcagctgtgcctgaattccaacgggaggaggaggagggwttaatgaagcatgtccaaccacccattcccatcatggcctgaactagtgttttgggtttactttagaatgcacttggcttggaggaggggtccatttggttggttggggggcttagaattttatttttggtttacattagtgatgtcactttgtctaatacataataattagaagttgagagtgatctgggacacatggggtgaaagtcctgaaccaacgcactttcrttagcagtggtgaatccatacggggttctgcagcaacctcaattcttgccttctcagaagaaagaattcaactgatgggcagaaggcagaaggagggaccaaggcaagttttacagcaggagtgaaagtttattaaaaagctttagagtgggaatgaaaggaaatacacttggaggctggccaagtgggcaatttgagagatcatgtgcacggcttgatcttttgacttggggttttatatgttgttggcatcctttcagggtcttgcatctcttcccccatgattcttccctcggggtgggctgtccacatgtgcagtggcctgtcagcagttgggaggggagcaggtgctgcatgtgaggcattcttcccttaccagcccaatgtccctagaaggtcctatgccagttaaaatgccactttgcctcttaatgtgtatctttgagcccactctgccagctcctaagatcttgtcaggaagctgctgatcaccagtgtcaggtttttgctatttattgggaagctgcctttccctgacactggtgaaacggccttgttgtctggagtaacaactgagatttactgtctcacagatgacaaggatgcagacgcacaaaaagtgagattgagagtggaagtttaataggcgaaagaaagagaatagctctttcctgcagaaaggggttccagaaaagtgggttgctggatctgtggtgaaatgcattggggttcacagatgagctggtgaggaggcagtgtctgatttacatagggtgcaaaaaactggttagaccaggtgtgccatttgcacaggggatgaattttttgtaggccccaccctaatcttttatcctgcaggcaggttctctgcctgagctatgccatgttacccatttctttgttcctgtacatgtggtagcaaagaaagggaagatggagcatccatgttggacatgcctggcccccagctagcccttttctattggcacagctgccagcattcccctgtgcaagcttccagcttgcttatttatgttttcagcttgatttttcaggctgctctttattaggagaaaaataatttcttgggctgcgttttgctagaagggamgctctgccaaggactctttgccctcactatctgcctaaacaatttctttctacctcctgtatcactgactgtgaccaattattattttagagtagcggttaactacctgaccatcacctgatggttacctgacatttctagtagtaggggttgtggctagggaggaggtctctcctgccctgctcatgtctgactagctacctactataacactttcatccatgttactttaattagttctcaaaattktggaggaagctatcgttttttagctaaggaaactgaaaggtgctttgaggttgtgaagtttccaagttcatatcattttgtaatsgcaaattggacttgtgctcaggccctctgattcctcccacctaaatggttattttctgttgggcaggtctttatgggcattgctggaactaagcttccttgtcattcatcagatgggggagctstcctatatcatggccttgatctcttcaatattttattcttatttataaactctcttttagttcagactagtatagcagaatactgaagactgggtggcttaaataacataaatttatttcttatcatgctgactgggaagtctgagatcagggtgccagcatggtttggttctggtgaggcctgtcttgctggtttgcagataaccatccttctgctgtgtcctcacatagagaagagcagagagtgggaagcaagctctttccttcatcttcttctaagaactctaatcccataatgagggctccacctcataacctaatggtctcccattgtccccatctgaaaattctgttgggaattaggatttcagtatatgaattttaggggggtaaaattttagggtgattcagtccgtagaaatctctgaatttcaaacaactccaaggtaatttgattaactcatgtaataaaagttcttgaatgcctacttgtgccaggtactgttacctaggtttactgtaagcaagacataatttccactcttgtggaaattatgagctttcattcttgtcaaagtaggtaacaaacaaaaaggaagctataaaatagtaagcgctctgaaaaaaatgaagcaaagtgctttgaggggagggaagtgcagtggcttctttagaaagatagtatggcaaagatctcttggagaaggtgatacgagaattgtaacctgaatacaagagaaatcctactgcgcacagatccttgtgttgcagtttttcttttatatatatwtttttccttatttcacatagtctggctttagtttctatgttgtttgtttctcttccttccccatcttggtggtaaattacctcactatcaactcaactcacattacatttctgggagtctttctgtcctggtgtgtatgtgatcagtaatccttacatagtatgtttgctaaatgtgtcctgtctctgtgctatcttcttcttcattgtcaagacccttggtctactactctcctggactccctcayttgcctctgaacttgtctctctgattttgattttccttcctcctgtccacatagctctctgagttcttattccagaaaactacctatggtcccatcttttaactacctgaaagttttcagtggtcttgcattgactcataaaatataaactcactagtatgatatttcagagtttttactggtgccttatcttcctccattcctttcacacaatattccctatgattccactacacagttctcccagtttcctgaatacactgtattcttgatgatttccatgaacacaatagcccttctttaatgcccaatctcttattttgtacctgataatctcctacccgtccttcagtatctacttcaaaagccagtcattcttgaagcacttccccatttctgtagttgtatcactgagaattaggatcagtggcatacaactcccaaagtaagagtgacaaaatcagtgagaaaaaatgatttttttcccctcatgtaaatgaagttgtaagctagacaacccatggcttgtaaggtgctccatagttaagatccagcatcattctatttaactcttctaacatcatagcttgaggctcccttttgctaggttacctaatggttcaaatagctgctgtagcgccaaccattatattacatttcaggaagtaagaagggacaataagaaggttgtgctcttcacctttaaggacacttccagaagttacccagaagaatcaattcatccattggttgaagacaatcccgtgtctatacctagctgagagacgctastgtgtttaattttttagcagggtaacaatttctaatgagaagaagacaatgtatattctgaggtagttaattgtctttgctacattctctgaacagtattattagtatccttcatgaagaagtttattctttttattcttcaagttcttgtatttccactataaccaatactgctatagaagatactyatgttgtctttatgatttggaccttgccttgtctccactgttaatttccagtgcatatcctatctaaggtttcctgttcgtctcactgtttcacacttttgtgaaattgcataattttttttctttaactggaaagctcttatttcactcccacctctactttatgagctctttccttattcatccgctttccatatggagttgatcatgtattcagttttgtgctcacatatctttcccctaagtagaccataagctccttgaacatactgtgtcttatgtatttaaaaattcccagcacttagaaccaggaaaaaaaatcacagctactcaatgcattcttgaataaattaataaaatgtacaactaaggtacatattcatttattttatacttttacaaacatttatttattactggcataacaaatatcatgcggcaagctagatgctgagatatagcagcaaacaagatcaacattgcccctccctcatggagtttaaattcatgttgagggatagagataataaacaacagataattatagttgtgagagagaataataacagagcaggaagaaaacaaactactaatgatgctgtggggctcctagtaggttgtatcttagttattttgtaaacatatttagttcttctttcttaatgaaaaaggtagatgaagaagtttactgttctatcatgacaggctcatgcctttgtgtatggctaccaccaaaaaaattgtaaattaccttctttaagttcattggcttgaaaaattataacttgcaaagcttcacatgtggagatttatgtgattcttgacattaatgccttaaaataaattattgtgctgaattaaacatgattaaaattctgggatattcatctctcttgactagcttaaatgtttataatgagaaaacttcacttaatcataaaaatcatttatatttattgagtgcttactcagtactgggtactgttttacatgctttacatgtgttaattaatttgatcctcacaaccaccattatagttagatattgatcttatcctcatttgatgatttaaaaaatgatacaagaaaaagttaactaatgtggccaaggtcaagtagttggtaagagaaggagccagtactcaaacccaagcagtgactgtgctctaaacccttactacttgagagaggggtcttcaaaccagtggcattagcatcacttgggagcttgtaaaaatgtaggatctgaggcccaacccagaccttctgaatctgcattttaacaagatccctgcattttaacaagataccacataagtgctcactcagagagtctgctttccatttctcttattctatatcacaacgctacatcaattctgggaatctgcccacttattgagatttaattaaaatattagtcagaaatattgaccctgttgacctctgtttctgtaaaccacttgggttacgtggatcaagagaaatatggtatcatcgcttcattaaagtagttaaaccatgatactggaaaaaatttggaagcaggaggttagatgccaaagcaagaagaacattttaaatcctccattgattttctttctctgtgttcgctcttttttattacagggatacctgccagcatcattttcttctttttctggtttataacttttccattaaaaaataatttgaaagacaatatggccaaagaattttatctggacctttcttacaggactttgtcattttgtctctcagttatttgagtgcttaccaggatataattataattcccagcatctatagagtacatatgatatagcaggaactgtgccaagtggtttttttccttagataatttatttgatcctcaccacagctttttaatggagatatgattgtggacctcattcaaggaatgagaaagctgaggcccagaatgtttaaaactatacccaaggctcccagtttaggcacactgaagctaaagttgaagccaggcgacatcaatacagagcccaccagctttaccaatgtactacactggcctgccatgayttcattacaagcattgggctgaaattagcataagcagtagtagggtagtcctttaaattttttttctggattctaaaagacagttattatcttacctgtgtttatgaattttgattttggtctctcaaaattatgctttgttaaaatgataaatgtttccagcattttaatgttcaaacaacccacttttctttcatgtatcatatcacatccgaatgtgccaactttatttagaaatatgtgrgcttcatttcttaggatcacttcaccaaactccaagaaccacttggaattatttttccctgaattggcatgagctacatataaattggcaatacatagttgggagtaaaattctgattaaagtcttgttcccgatagataataactaacaattgagcagctgccaaacagcaccaattgaataagtgccaatgagatccaagatgaatgtgtcaaggactaatgtactgagaacaattagtccctaaatcccttttaatcatagtaagtccatgaccaatgcagttaaaacagccatgattgactctaaccaaaaaaagcaataggggaattccataaaatgtttccaaataagcaagttcagtggaggctggagatagagtacggaagagatggatagttaagggcattagggaaataagagagtccatcatgtcagtgatgcaaccagatgagtcagagttttagaggaaaccaatcatgaaatagtttgtgatactgatttaaatatatctaacaccagataatcagataatacaacattccaccatagatccaagactttgagtccagattttgtggtgtgaaaaaatataatttactcagtcaacatacttttttttttttttttttttgagatggagtctcactctgtcgcccaggctatagtgcagtggtgtgatcttagttcattgcaacctccgcctcccgagttcaagtgattctcctgcctcagcctcctgagcagctgggwgtacaggcgtgtaccaccacagctagctaatttttgtatttttagtagagacaaggtttcattatgtcggccagggtggtctcctgaccttgtgatccgcctacattggcctcccaaagtgctgggattacaggtgtgagccaccacacccagccaatatacatattttttaaagcaccaactctgcctggcacagggctagctgttgaaatactgagataagtgaggtagtttctgccctcaagatgattatagtttaatataagattattgtgaacaaataactatattcttacagatgctgtgattaaagaaaataaatggctcagtgggggcacaaacataagggggttcaatcctctttgcagttttccatgatatacactcatgacctcctctaaggcctggtttccttcatatccattgtgtgtctctcttcctaggccttattccctctgatcacacagaatttccttttgcaattctctgatcttttctacctgtatgcttttgcactaatttttgtctacgtctaatatgtctttttctttcatttcacctgtcaaaatgtggtttatttttggagtgggatctcctgaaatgccacctcctccatgaagcctcacccctcctcctaccatgtacaccctcttccttgttctgaggtacttttttaaaattttaattaattaattaattaattaatttttaagatggagcctggctctgttgccaagctggagtgtagtggcacgatctcggctcactgcaatctccgactcctgggttcaagccattctcctgccccagcctccggagtgattgggattacaggcgcccaccaccacacccagctaatttttgtattttcagtagagacggggtttcaccatgttggccaggatggtctcgatctcctgacctcatgtgccgcctgccttggcctcccaaagtgctaggattacagatgtgagccactgtgcccagtcattccaaggcacattaaacttgcacacatcacatcatatttgtttatatatctgtaactccctgaggcaaacactgtttccttatctgccccaggattaaacagacttgtagtaaattgtttttatttttgtttttttgatagttaaaaggattaaacaaattgatttaaaatcattcttgaacctaattactttctgggcacatagtatgagtagtcagtttatgaactgtacaatgcatatgttattagaaatagtatttttatttgatcctccactgacctatttgcaatttaaagtcctgtttgtttgacctaccttcacattgttagggatttatgtgacattttgatccctgaattaggatgtgtgagtcgagtcctgtgtgaacaattaactttcttaaaacttcatgctacttttagggagtacctgtttaaggtagctgagtggttagacatgctggcagaccactctgaagagctgaattaacagagaatctgtaatctgctgttacaaacaaatgaaaaccaagaagtaaaattaaataaatatcatccctagtaacatcatagcacaaaaaatatttatgttagggacttaaaaaatgtgcgaaccctggttaaaaattagttagaagtctaaccaaattttaaataaaagataaacaataaactatccaaagaaaatgtttaggctgggtgcagcagctcacgcctgtaatcccaacgctttgggaggccaaggcaggcggatcacttgaggtcaggagtttgacaccagcctggccaacatggggaaactccgtctctactaaaaatacaaaaattagccaggcgtggtggcctgtgcctgtaatcccagctacttgttaggctgaggcagcagaattgcttgaactctggaagaggaggttacagtgagctgagattgtgccactgcacttcggcctgggcaacaaagtgagcaaagcaagactccatcccaggggaaaaaaaaaaaaagacaaaagaaaatgtttcatgttatatatttatttaagaaatatattttggagtaccttctctatatagagtgtgattaatggtatggaatgcataaagatgaaaaatatagagaatttttgtcctctaaagaacatacattggggaaaaggacacgatagggaggaatgagagtttaaatgtcctgtcactgttcttattctatcacagtggcatcactgatagcaagagagtccactaaaggaaacgactgcccttgaatgatattctagtggaataatcaatactagaatattgtgagcaccatcgagcaggtcattcaggacaattaaaaatcgtgacacgagatcttcctggttttgggaacaactgtctccagatatacagagcaggattttaagttggagaaactgtgaccaacttccctgaacctagctttctcagttgtcaaatgaagctgaataatctctgttgtacagtatgtgtgtgtgatatgcatgtttgtctacttagataaataagggaatgcatagaaaacatattagaagctctcaaatgctattcaaatatgttattaataatccattaatgtattacagaaatattcactgagggactttactgtgtgccagaccttagctgaggtactgatgcaacaaagaggaatgagatagagactatggcttcaagaaggccttagatttgtagatgataaagatatgtaaacagaccaacaaaacttagtatggtaactgtgaagagggagtaagaagtacactggaatgcaaacaagggagtaattagtattgtttaggagttcaggmaaggcaaatcatctttgtaaactaaatttaaagggcaagaaattgtcttcaaaggagaggggacttgggggaagaacaatccatggggataagacagtcatatacaaagaaagatcagatacatgaaaaaggataggtaattcagtaaactgttttcagtttggtgtttcaggaataagatcygtaagattagaaacagtgagaggatgcagaacaggtggctgttcctgcagcagtagagcgcatggtataatagttaagagcattsactcaagccaaactgcagggatttgaatttaggttctgcaacctgtgtgaccttgagcagggacttagtttctttttctgtgagttgggggtaataataatatctatcacataggattaagaatgacatcagttaatatgtataaaatattgagaaaagtgcctggcacatagtacaaagtgtatgtcttagctgtcattatcatgattttccccagccaattcctaggaaatgatgtacacagctgcaagaccatttatcttttattctgacattctaacttactattttattcaataattcctaagaaaaatgtgaagtagaaattgaaagatcaaacaaacagcctcttaagaccttaggaggtttgtcaggctggttcagtgtaamaaaagcagcctaggattgactggactcaactggggcatctgactgttagctggctaagcttctcactgatgcaacttcagtcaatgcctggacctctcaggaatctggaaataaccgctctcaacttcttctagcataggtcagaactctctgctgcatccttcctcaaagtcttcataaccttatagccagttatgtctggggaacagtggggacagacaatgtgggaggagttaggggaaggcaggaagttgcatgggtggggaagcactctgtcctccaccctctacgtctttctgccataaacctggaggcctaaaccctcacccttgagtggaaaggcaggcctccattaaagtaggctgggttccttaatgggctaatataagcatgtgtgccagggaaggagtggaagagaggatggggtctttatatttgtgcatgattaaaaggtgcataatttttgccagatgcactggctcctgcctgtaatcccagaactttgggaggctgaggggccagatcacctgaggtcaggagtttgaggccagcctggccaacatgccgaaaccccatcgctactaaaaatacagaaattagctgggcatggtgacatgcgcctgtagtcccagctacttgggaggctgaggcaggagaatctgttgaacccaggaggcggaggttgcagtgagccaatattgtgccactgcaatccagcctggatgacagagtgagactctgcctcaaaaaaaaaaaaaaaaagtcacataaattttcccaattaatgatcttatgagaaagacatgtgtgcctctgagcacaggcagaaacaggaggttgtgatgggctggctgtgacccaccaccaagtaacatgacactctggtcattgtacgtagggtaataaaagtggatcttagtggctagaaaacacagagaaatatcttaccagcagttaattttttttagaaaatatattgtttagaatcccatgcgcagaaaaacacattattctctctcaatcaatgtcttatcaagggcaaaagcattttactcgattccatgatgctacttggtctgactactctcaactcctacctcactactggacagtaagtcctgtttttagagagccctacacaaggaagcatgacaaatcctgttgacatcccatctcagtattgaatcattccttataagtcccagttagtgcttatcttaatattatttgggagctgaacaataatagatcctactacattttggcctgtccaggaacctgacccagttgtactcaccacactggaggaaggtttaacaaccaaaggacgagctataagttgctcttatgcaaacatgatgagtttcacaaaatatacccaagtattaaactcattaacatcttcattatgccacacattagccaaggattttatcactttttttgttcatttgcagttttaccaaattggtgatctgctcttagtatctttccaattaataggatttttaatagtcagtaaattagttttaaacctatctttctgcatccatcattaagctctagagtgaatttttataaattgatgagagtggggtaagtggaagctacattgtgtgactttgtacacatccactgatctctccaggtgagcctcaggttctcaggctataagagcagaatactgctactcatcttccaagctgtggtgacataaggttaggtgatacatgtgcaaaatattttgtaaaatttcctgctcagaaaagattttagatagtactataattgttgttaagtatctaaggaagagaaaatcgacattttatagccctttcttatgtcttccttgtcatatgccttatttatgaatcgtatttgaattctgaattgtagtcatagatgtaaaaaggtaaaaaagatattatagtacagtgtctcaattaaatgtcatcagaaagtaatatttatataaataccagaacttggccgggcatggtggcatacacctgtaatcccagcactttgggaggccaaggcaggtggatcacctgaggacaggagttcgagatcagactggccaacatggtgaaaccccatctctactaaatacaaaaaattagccaggtgtggtggcacatgcctgtaataccagctacttgggaggctgaggcaggagaatcgcttgaacccaggaggtggaggttgcagtgagccgagatcgcaccattgcactccagcctgggcaacaagagtgaaagtctgtttaaaaaaaaataaaaaaaatagaacttaaattttacctgtaatacattgctatgttaattttaatatagtattattatgctaatattgttactattagtttttagtaatttatctaataacataatatctataaatgcttagaagttataaaaaatattaaatataattgtgtatatatttcaattttaatgttatctgagggccaaatttatctatcattccttcacttagtaagcacttgctaagttctttacatgagacaaacgtggcagtagtcactgtggataagcaaagagagtccttgccttcaaattgtaatgctaaccccaactcccaattcacgtaaaagaaaatattagctgatattttctttaaaagttgaacattcttcttgataataggatctgacatgataagaaaattttcttaaaatgctgtacaggtgacttaaactgggcagccagctagaaggaaacttttgatagaaaatggcctggaggaaacaaagaaactttgctacttagcactttacatagatagcattaattgagaatagctgcttcttaatattattattattattatttgagatggaatctcactctgttgcccagactggagtgcagtggtgcgatctcagctcaccacagcctccacctcctaggttcaagcgattctcctgcctcagcctcctgagtagctgggactacaggcgcgtgccaccatgcctggctaatttttgtatttttagtatagatggggtttcactatgttggccaggctggtcttgaactcctgacctcatgatccacccaccttggcctcccaaagtgctgggattacaggcccactgcgcccagcctaacattaaattttaatggttacacagatacaggcgttttgatttgtttgtttcacccaatcaggatgcttaagttcatgcatgtgaccaggtgcagtgcctcatgcctgtaatcccaacactttgagaggttgaggcaggtggatcacttcagcccaggagttcaagagcagcttgggtaacacagtgagactctgtctctaccaaaaaaaaaagtaaaaaaaaaaaaaaacatcagctgggcatggtggcatgcaccatgcacctgtagtcccagctacttaggagactaaggtgggagaatcgcttgagccctggaggtgaaaactgcgctgagctgtgatcatactactgaatttcagcctgggtaacagagctagaccctgtcaaaaaaaaaaaaaaaaaaaagaaaagaaaaagaaaaaaaaagcacgtgacactttttaagctcttataaattcttagtcatataaatggttggtattcttaatcccctaaactcatttggtagctgtaatttttatacataattgagcttttatttctctttcattaggaaaccttcttaagtgtgtaattgttatccatgttagaagattgatgttattccctcagcacataaaattatagaatagcattgcccaaattatagttttgttttatgtatccctcttttaatttttaattgagtttgctagcaccaggagtgaaacatagaaaccaacataagtaagttttggtgtatgtgtgtgatttgtgattctgtgtttagagtcattaaggtaattagaaaacctatggtaaatagtaaatctctagcttctgtgtgaagcagtgagtattatagatacttactaagcacttactatgtgcagctccaggttctgtgagaggagtacataaatcggtaatctgtggtctagtaccataaggaattttgtctaggagatataagagaagttcataaccagagttcaagttatgaagtgatgagtctcagtacagagcctgatacttaatgaatatttgtggaatgaatatacgaacacattaatatacaaataaagagagacactaaggagagtggaaagtccatagagggaacgattatttttagcagctatgtcagggacattttcagggtaaaagtgagacatttggtagagtggtaaaatttagatatgtaagtattcctgacaggtggaacaatgtgagattttgcctgtgctgcttctttgtttccccataattgttttttaaagcaaattgatttaacatcaacagccaaaaataagaaccaagttacagtacatgtatataacacagaggagcaactttaaaaccaatacaataaaatgagtgaatgattacaaatgaagcccaaccgtaagctggctgcaggtcttaaggggcacaaagacaagaagatggccataagtctgagtattctgtgcaggcgcacatatgtaagctttggggaggaagacagtgcttgaacaacttagagatttcccactcgctgaaaacactccttctagggaaagaaaacatctacctagatggatccgcaaatagttcagtgaaaaaatataggtcagtaagcctgaggcaatgcacatttctttttccctaataatttgttacaatttcatgcgaatttaccatatcccaagaagtatattaattctaaaaaataatctaaatttaaaatttttattttacagttgaggccaaactcagacacgtactttgtggtttttctaaaattatgattttattaagaatcaagactatttaaagataggtctcttcaattctcaagttcaaaatctccccgtaacaatagagtacctctcacacattggtgaatgagtacaaaggatttagatgtagaaacttgacttcaagttctagttctgtcactgcttaatgttgtaaaaataaccaagtcaactagggacaaaaagttcatttaggaaattattgtaatacctcaggaaagaggaaatgcatatcttagyaggattgtgccagctaaaacacagaggttggaattacattcagaaattctctgaaggtagagtcagcgcatcttgacaaccagtaaatcatggtatttacaggattgattatgtaatgtgttttccctgaagtatggtccttggaacatcaactctaggagatacaagttaaggtaccaatagctgccataataaaccccataatttcagtgccttaatacaatagaaaaatatttttctctcacttaacagtctaaattgtttatcagctttggccctattgatacattggataatttgttgtcatgaagagctgttctatgcactgtagaatgtttagcagcttccctggcctctactcactaaatgtcagtaatgccaactcctcagtagtgataactaaaaatatttacagacattgccaaatgtttcctgagggacaaaatcacaccaagtagaaaatcgctggtctaatatatgtattcctgatcactgagaactttcttccacacagtgacccaggatcctttcattttaagggtctgccaaacttctttctactagcagagaaaggagaaagagatcacagacaagggataccgttttcttaaaagccttgcttcaggcactcatatgtcttttgctcaaattccaatgtcatgaacctatcacccagtaatatgtagatacaagaggagccaggaaatacgctcttatttggaagcttgcttcccaggtccatccttctgtcaatccttccttccttcctccctccctccctccctccctccctttctccctttctctcgctctctctttccttccttcccttctttccttctctttctttctctctctctctttctttctctttctctctttctctctctccctttttccctccctccctccttccttccttccttcctttccttccttmcttcctttctttccttccttccttcctttccttctttgtttctttttctttctctctttcttcagcagagcctgcactgtcacccaggctggagtgcagtggcacaatctcagctcaccgcaatttccacctcctgggttcaaatgattctcctgcctcagcctcccaaatggctgggattacaggcacatgccaccacacctggctaatttttgtatttttattagaaatgggatttcaccatgttggctaggctggtctctaactcctgacctcaagtgatctgcccaccttggcctcctaaagtgctgggattacaggtgtgagccactgcaccaggccacaggttctactttctactatggaaaagagagcacaaaatttgttgaacagctagcaacctctgccatagtctgactgaaaacatgtttcctagccaaatatttttggaaactcttcagattaaatatctctcttaaaaactcacaatgaacattagcactttaaagtttctgagcaatccagcatggaatgtgtctgttaagttttcttgaagttaacacgcctgaaatttatttgaccacataatcccttctcccccattttgttgttgatttttgtttttgagataatattagtgtgctattgatggttgtattagtccattttcatgatgctgatacaaacatatgtgagactgggcaatttacaaaagaaagaggtttaatggactcacaagttccatgtggctggggaggcctcacaatcatggtggaagatgaagggcacatctcacttggcggcagacaagagaagagactttatgtagggaaactcccctttataaagccatcagatctaataagacttattcactatcacgagaatagcacaggaaagacctgcccccatgattcaattacttcccgccaagtcactccaacaacacatgagaattgtggaagctataattcaagatgagatttgggtggggacacagccaacccatataaatggtcatgatatttctgacaccttatttctggcttctttcggaggtgttagaacctgtaccagagaatggacagaaataaggaaagaagttcatattgatggagagtttgaacatattcattgaccagttagttttaggaaacattctgctaagtcttatctattgatttgatataaactaatgacaattagtggtttttaaataatcaaacttttttccttccattcatttattttttaggagctaaatgtgagcttgccactttgtatacatactgtccccttgaatttttactatattttcatgattccataatgccagctggtaaattcagaaaaacaaatacactttatttattataatctatttaggtagtagggaaatcaggaaattcctaccatatttaagcttcttagtacctgaattactatgagcaatataacatttctttgttgctaatgatttatattatagcccactatatggtctctccaccaattgctagtattaagtttgatgtctccttcatgctttccattgcacatccgctgctccttttattctccttactcttagccctatttcctactctttttcgttttccctcatctctaggttggacaagcttattctttataactttctctttcttattcatcactcatcccaacccaaatccattgaaagtatgtgtccattttacaatatcctgttagataaacaaaatcgttacatgtaaaacaaatattaggcttaaagattcctattatagtgtagtaggcagatttttgccccccgtgatctctcctgcttggcgttattcctttggttatattacataatgcagtcaaagggaatttgcagacataattatggttgctaatcaactaaacttaaaatagggagattatcctggattttctggggggattcactgtaattacatgagccttaaaataagaagagaaactcagaaatattcacagcatgagaaggactggcctgctgatgcttgcttgaatagataggggcccacaaagaaagcatgagaaggaaattacttcaaccagtgagcttagacccagagccttatattasgaacacagccatgggtgacactttgatgtaacctagtgagactcagttgagaatcccattatgtcatatcaaacttctgacctacagaaatgtgagataattaatggctattttttaagccactaaattgcagtaaggtgttatgaatcaatagaaaaccaaaacttaccgaacaagtcagttcttccctttccaaaaccactacttctggaattcattaagcagtgagcaattggaatgcattcaatttataagctgattctaagacattgtccaatacatcatttttctggactatttctacactaaaaatgacctgttcatgaccagtgatgttatttttttatcttttcatctcagagtatgtccttatctacctactttcctcagagaggtttgtttctgatgctgatgctggaccctctataggtatcatctaacatatgctcactagtaacatcattacygcacctcaatatctggttttcctctctttcatgagcatgtagatgggacactacatttcctagctcctttgaagttaggcaggatcttatgttttgttctaggcaatggactttaagctgaaccagcaaaaagccccttcttgacctccagctctttgttaacagcctggaaactgctcaacttgtagaagatttttgtaaggaaaaaaaaataattgatagtgttaagacactgaaatttaggtgttaattttgctcaacagtgtaacctagcctatcctgattaatccagaaacagatacacgctcttcccagtgacaatattttactagatttctggattatccttcattatgtagcattcagaccaagatactatgcctactatgatcaggtggaagttttctaattcagctcatgttgcagagaaaattcagagtatgatttttgaaaaggaaaaaataagctttgacgtgtttyggacctatgtatcaactaaaacaggtacatgcttaactccaccagcaacacgtctactgtgattcatattcttctttctgtgtttttctttgaagttactttattcttttgaagttcaccttgaagaactgagcaactctaagacagtcattatttcttcaccatgacatgactaatagcttctgccataggtgacagttctttgcaatctttaatttctctttctattcttcaagacttgcattgaaatgtatcttcatcaaatggatatatttataccttttcctacttaatcacatttctgatataygattgctctttcaatagattacctaagtgcctgaaaagataactactcttaaaattgagccaagatcattttatctctttttgcttgaaaaattccagacagttggttaatctgcttaacaagagggtgtggaagtggactgtaaactgaatatgctagttatgtttctctcatgaaattaaaactaggtgagttgtaatttacaacctgagatttcatttgacacatactttttagaagctgtactgagagtgcaatctggctaaatttaattttacgtaattttccaagattatttcttcatctcaagtttctgagatatagaagcattggtctacaaaaactgaggttgaactcttgaggatttgtttataaaaacatacatatagatatactcagacatatatgtttatacatatataaacatgtatagaatatacatgtatatataagcatgtttacacatatataaaacatatttatatgtatgtttgtatataaacatatacatatgtatgtacacataaaaacatatataaacatgtatagaaatatatattctctcatatatatattcatatatgtgtatatatattcatatatatgtatatatatattcatatatatgtatatatgtattcatatatatatgtatatatatatgaagaccctagttttggctctgaattgatagctgaactttcaggttagtatttgaaatattcatcatcatttttcactaattctactaagcttgggctttttaaattactgttttaatttgttaaggaaaagaaagagtaagcaggataatagtccattgggttatttgccctctgtgggtgtgatcagcagagccaaacatattaataaccaataatgaacaattgtgatgtataaaatgatatggttcttggtagagtcctccattcaagctagtgcaataacaaaaaccacagtgtttctcagactttattgtgtataggaattacctagggatcttacatcctttttttttttcttttttttttttttttttgagacggagtctcgctctgtcacccaggctggagtgcagtggcgtggtctcggctcactgcaagctccgcctctcgggttcacgccattctcctgcctcagcctcccgagtagctgggactacaggtgcccgccaccacgccagtctaattttttctatttttagtagagacagggtttgaccatgttagccaggatggtcttgatctcctgacctcgttatccacccrcctcggcctcccaaagtgctgggattacaggcatgagccaccgcgcctggcctcttacatacatkctaatttagtaggtcttaagtctggaaattttacatttttaataaactcttgggtaatgccaatgctactagttcatactttggatcataccttgagtagcttacctctaaagcagtcattcattaatttattcaatagacatttgttgagcccccagtgtgaactaggccttttaagttcatagagcatttcctgctcttaaggagctcacatcctagcaaagtcaggctcatacacagataactaatgaaaatgagaaaagtgatataatgagatgactacaaagggtatggaaggttagatgggggtgattaatccttcttgtggtgtagcaagggagttggggtggcaatggaagatttcctctgacctaactcttaaggactaggagttcttttcattttgaagatttatgtttgctggaacaaggcctagggagttggtaaactgtgtaagcagctcctcctgaaagtaaagaataataacagtgtggctcacacaatgtggcagcatggattttcagacgggaactatctacctaccccgtctcataaaagtgaaagtaaggccgggcgccgcggctcacgcctgtaatcccagtactttagggagctgaggtgggcggatcacgaagtcaggtgatcaagaccatcctggctaacaaggtgaaaccccatctctactaaaaatacgaaaagttagccaggcgtggtggcatgcacctatagtcccagctactcgggaggctgaggcagtagattcgcttgaaccgggaggcggaggttgcagtgagccgagattgcaccaccgcactccagcctgagtaacagagcgagactcttgtctcaaaaaaagtgaaagtaagtaccgtacttgaattcagtcagatgaccccttagaaaagcatcattagccactggttttcaagtcaattacgaaaactcaaaggcttatttgttagtttttaaataggtttaaatggacaaattctttgatctactgccactacttcttaaaataaaattaacaaaggcagattttcctttaagcaaatgaaacttagaggccattcatttgcatggctctttccagtgccccaagagggattgcagcaattgtgtttttgtaattttatgtcatttttcttaaataagaggtccccaaattatataagattcaagccccacagaacctggatccagccctgcaaacataccttctattgtgagaatcattatgcttttagtgtttgctttaaggaatatgctctggtatcactataattggtaaatkatgtttaatcaattttcatacagttgagctctgcaggtaataacccaaagaaagacggtctccagggatgataaaaattatctcttaactcatgaatattccatttgctcattttctacagatagattacttcatttgaaagtaatagaaaaacacagaacggcatgcatgctgcaaacagtgcttagtgtaaatgtttcataatgaaaccagcgtcttggcataactgtttatatgcaatgcactgagcctttccagctcacacttgagggaggttatatacacatctatttatcctcttatatagaatagaagtatagcatatattctaagtttggaaatgttggagccatctactctaattttgataaatatatcttatcttcacagcaaaaaaagtctgaatataatcagccattattttccctttaacaaaagggatttttctgctgagttaaatctgatcctatagactgagtttcctataggtgataaaactaaataaaatagttttaaacatagttataatactaaggaaagtctattttatcttgaattaaaattttgtcttccattttttagtattgtttttacctaaagcaatagggaaaatttgggaagtgggcatgcatttattatatttacccataagctttccctttttaaaacctgttacaaattaaattggctgggtttggtggttcacacctgtaatcccagcactttgggaggctaaggtgggcagatcactggagcccaggagtttgagaccagtctgggcaacatagtaagacccaatctctctcttaaataaataattattcaaactaattttgaaagcttctcttatagagaatatggcactggtctcaatctgagcagggaaggaggtgaactacaagtataataggataatactcaattacctaggctgaagtgggttatcatttgcattcatctctgcaataataggaatgccataagagaggaatacagcaatayagaaagtacttttgtatcaccaatatgagagggcttaattgcaatcaggagagtctgagatgactataatcactttttacagtagtttatgctccagtgagaactaacagatgtcatatatttctgttatatctgtttctacagttgttttgtttcttttcatccaaygatatactttagaaacttgattcaagagttcaagtcagagcttttcttttccttacctaaatgtttaagtgaagtacaattatatacagcaaaatgcacagatcttaaagtgtacagattgctgagttttgataaacgaatacgcttgtgtaacactttaaactgagatatagagtactgacatcaccctagaaagttctcttttctttttttcagtctgtgccctcccagaatcaaccagtatcctgatttctttcttcattacttagttttgccgttccttaaactcataaaaatgaaataattcagtatatacttgctgtgtcttctatcactcaacatgttttttaagattcattcatattgttatttgtatcaagaacttgttcctttatttctaagtagtagtctattgtttaaacataymataatttgtttatccatgttcccaataatagacatttcagttgtttgcagttttttgcttttctgaataaagctgcaatgaagattcttttttttttttttttaatttaagttttagggtacatgtgcacattgtgcaggttagttacatatgtatacatgtgccatgctggtgcgctgcacccactaactcgtcatctagccttaggtatatctcccagtgctatccctccccsctccccccaccccaccacagtccccagagtgtgatattccccttcctgtgtccatgtgatctttacaggacwctttgtggacatatgttttaattaattaattaatttaattttttggagacagagtatcactctgtcacccaggctagagtgcagtggctctatcttggcttactgtaacctccacctcccaggttcaagcaattctcctgcctcagcctcctgagtagctgggattacaggcatgtaccaccatgaccatataatttttgtatttttagtagagayagggtttcaccatgtttcccaggctggtcttgaactcctgacctcagatgttcttcccgcctctgcctcccaaagtgctgggattacakgcatgagccacyatacccagtctaatttatttggagtagataactagaagtagaatttctggatccttagataggtgttatgtttaactgttatargaagatactaatctttaatcagaacctgcccaacattttggtacagtggttgttctagtctacatttgcaccagcagtgtataagggagccagttcctctgtatcctcttcaacattaaatgttgttcatctttttaattttagctattccagtgagtggcatctcattgcgcttttggcatgtgtttccactaagactaaagattttgagcatctttttcatgtgtttattgtttattcatatatcccatcttgctaagtgttggtccaagtgtttgtccatttcttcacgaacaaattttttttttttattttggaacaatcttagatttacaggaacgttaaaaaaataggaaagagaatttctttatgcccgtgaaccagtttttcacattgataacatattatattaccatagaatatttgtcagcattaagaaaccaacttkgatatattactattaactaaactccaaactttatttggattccaccagtgttcctattaacrtatactttctcttctggaattcagtccgagattccgcattgcattyatttgtcatgttactctaagtcctccagcctgtgacaatttttcaggcttttcttatttcttgcgaccttgattatctttagaatactggccaagtatcctgtgaaatgtgcctaatctagatttatctaatgtttttactttaatgatcagactagttttatgagtgtttaaaaagaatatcacagaggtcaactgtccttctcaatacatcacatgaggtgatgtgtaatatctacttgaygtttctggtgacgttaacctttatcacrtggttaaagtagtgtttccagattctctcaagggacaaatctaggtaatatatgtatgtatattatcctatgtatacacatatatctataatttttaaatctattaatttgggtgcatatatgagtctatatttaaacatgagttcatattgatgtctctgactatactccagttctattctaaccttccttttctgcttatcggttacttccctctccaaaagtgagaagctagactcccactttctaccatccactatttacttaataccagtatacatgtaaactggtttcaaaacttttarccttaatccctatgataaacaaatttatcaattaaagtacagtgtttatgtacagtgtacacttccttttatctttaaatacatagttttcagccaaaacaccattttctttatttttctttcattattttttattttaaaaagtttattctggccaggagtggtggctcatgcctgtaatcccagcactttgggakgcccaagtgggcagattgcctgagttcagtagttcgagaccagcctggctaacatggtgaaactctgtctctagtaaaaatacaraaattagccatgtgtggtggcgcgcacctgtagtcccagctactcaggaggctgaggcaggagaatcacttcatcccatgaggcagaggttgccgtaggctgagattgcaccactgaactccagcctgcatgacagagcgagtccatctcaccaaaaaaaaaaaaaaaaaaagtttattctgagccaatatgagtgaccatggcccacagaaacacagtctctagaggtcctgagagagtgcaccaaagttggttgtgttacagtttggttttacacatttcagggagacaggagttgcaggcaaagacataaatcaatggaacaaaattgtaagtcaagatatagtgccataaatatatagtaaaagtaaaatacaaatactaatgtatacatgaaacgtatacattggtttggactgcaaaggtgagatatgttgaagcagaagcttataggttagaggtggattcatagatccttttttaaaaaaacttttatttcaggttcagggatacagaacactgttttctaaagttactcaggtgagccttttttccccatgtaaagaaatgagctatttacttttttattatttatttatgaaaattgttttgtatattcaagatgcaaatctttttcataaacatgttttgcagttctgtcccagaccgtggcttacattttcactttctcaagagtgacttttgatgagacatttacatttttatcatgttgtttataaaattttcttttatggttagtgagttggattctaaaatacctttgcatatctctagatcacaaagaattttaaaaatgttttcttttatgaactttatagttttaactattacataatggtttttaatccatcacaaaatacttattgtgtatgatgtgaggaagatgtcaaggttcaatttttccaatagatatccaggtaatccagcaccattggtcaaaaagatgtttctttcccctctgaatgccattggcgcctttgtcaaaaattattttactayatatttatggtactatatctggactcagtattttgttccagtgatttatatgtctagcatatgccaataccatactgtcttagtaagtatagctttataataaatattaaagtcaagtagtgcaaattatctgattttttttttctttcaagattgtgttggctgtcttgaccctttatatttctttatacactttgrggtcaacttaccaaattctgcagaaagcctgctatgatattcattggcatttcattgacttttcaagtaaacttaaaaataatttacctctctacaatattgagtcttccarcccataagcgtggtatatttttccatttatgtaagctatctcagcagtattttgtaattttcagtgtaggagtagtcatatatacatacatatatatatatatakwgagagagagagagagagagagatttattcttatatatcttgtattttttgttgctgatgaattggcattgattttttaaatttaattttccaacagttggttggtaatatacatacatgcaaataactttttacattgaacttttatcctaagacgttactgaattcccttattaacctaattttatatgaattttttggtatttgtttgttttagatttgggggaggtttctacatataaagttgtgtcatctgcaaacaaagtcatttttatgcattattccccaaattttatgccttctatttattttctttgtccattataatgtccatgctaaggtctccaatataatgttgaatcaaagtaatggaagcattatcacaaawaggtataaagatactgtccgattatttttctgtacctattgagatgactatatgaattttctcttgtatattattagtatgttgagttacactgattgatttttaaatgttaagcccaccttgtattcttgtgaaaaattccccttggtcctgatgtattatcctatttatatattattagatttggtgtgctactattttgtttaggaattttgcatctttgttcttggaggatattgatcttttgcttttctcattgtgttcttgtcaggttatattatcagactaaccctggcctcaaaaaatgacttggkatgttttcctttgttctctattttgtggaagagttwgtataagaatggtgttatttcttctttacatatttggtagaatttacaagcaaggccatgtggacatggaattactttgtggagtttttaaacttcacattcaatgttttcaacagatgcaggacgattcaggactatacaagactatacaggactaaacagttttctattccttcttgaataagctttggtagtttgtgtccattgaaaagagtttctatgccaaagaaactgcaacttagatgaaatattacagtatttcatctaagctgcagagtttactagcatagaaatgttgataatattgccttcatttctgtttaatatatttaagactcgtaatgatgttctccctttattcctgatattggaattgatgccatctgtctttaaaaaaatcagttttattaggtgtttatcaacttcattgatttttatcagagtactaccttgtatttggtgacatcttctattgtttgcttgctttctatttcactgacttctgtccttcattattttcttttagttactttgaatataccatcttcatttttgtagctttttaagatagaagcttagatcattggtttttgatcttttttgatttccattacaagcatttaaggcaatgaatttccttagcaccactttagctgagtccaaaaaaatttgttatctattatgcttttattaagctgcaaatcaaaatattttttattttctttatgatcttttatttgactcacaaataattaagaaatatgttactttatttttgtttttttttaatttaattctgttattctcagagaatttagtctatgttttcagtcctttgaaatttattgagatttgttttatggcccagtgtagtcttacttgatgagtgttttatgtgtgcttaaaaagaatctgtattatgcatatactgagtgttctataatatatatagtgccaatttggtcaatagtattatttgaatcttttatattcttactttttatttacttgttcactcaattactcaaagaggaatattaaagtctccaaatatatttgtagattkgtctatacttccctttagttttgtaagtttttgctccttctattctgaagctttatggttaggtatgaatacagttaagattgctttgtctttctgctgaatctrtcttttagtccttatgaaatatccctctttttccgttttgctccttgttttacagtctacatcatctcctttaataacgcagttcactattattatgatttgtgttagctttatttaccatcctcttaatttctatctatgttttttaatttaaagtacatcagtggctgctgggtgcggtgactcacgcctgtaatcccagcactttgggaggctgaggygggtgtatcacctgaggtcaggagttcaagaccagcctggccagtatggcaaaatcccatctctcctaatcatacaaaaaaaatagccaagtgtggtggcgggagcctataatcccagctacttaggaggctgaggcaggagaatggcttgaattcaggaggcagagggtgcagtgaaccactccagtcctggagacagaatgagactctatctcaaaagaataataacaaataaaataaaataaattaaaaagtatatcaatggcaagcattgtagagtgtttttattaatgtctattctgatatctgccttttaattgaaatgtctttcatttgcatttaatataaataataattataatgtttcatttaagtccaccattagtaatttatctgtttcttctgtttttttgtttctttgatcttcctttccagccttcttttggaataatcacatattttgtagtattttatcttcctgtattgaaaatttttcttgtattaatttttagtagttgcactgaagattatactatccatctttaacctattacagtttagatgaatcaataccgtgccctgccacatataagaaatttattgtactgtatttctctatttctattttttgtgttactcttacctatgctgtacatccccacaaaacgttgtttgctttaaaaatcaaatatcttggcaggcacggtggcttrcgcctgtaatcccagcactttgggaggccgaggtgggcggatcacctgaggtcgggagttcgagaccagcctgacaaacatggagaaaccccgtctctactaaaagtacaaaattagccgggcatggtggtgggcacctgtaatcccagctattcgggaggctgaggcaggagaatcacttgaacctgggaggcagaggttgtggtgatctgagatcataccattccacaccaggctgggcaacaagagcaaaactccgtctcaaaaataaaaaataaaaaatatttttccccgacttttatttkaagttcagggacacatgtgcaggatgtgcagacttgttacataggtagatgtgtgccatggtggtttgctgcacaggtcatcccatcacctaggtattaagaccagcctctattagctgttcttcctgaggcattccctcctgtcacccacaccctctgacaagccccattttgtgtttttcccttccatgtgttcatgtgttctcatcattcagttcccacttataagtgagaatatgtagtgcttggttttctgtttctgtgttagactgctgaggttaatggcttctagctccatccatgtccctgctgcaaaggatatgatctcattccttttttttttttttttttgagacggagtctcgctctgttgcccgggctggagtgcagtggctcaatctcggctcactgcaagctccgcctcccgggttcacgccattctcctgccccagcctcccaagtagctggaactacaggcacccgccaccacgcccagctaattttttgtatttttagtagagacggggtttcactgtgttagccaggatggtctccatctcctaacctcgtgatctgcccacctcagcctcccaaagtgctgagattacaggcgtgagccaccacacctggcggatcgcattcctttttatggctgcatagtattccatggtgtatatgtaccatattttctttatccagtctatcattgatgggcatttaggttggttccatgcctttgctattgtgaacagtgctgcactgaacatacatgtgcatgtgattttatcatagaatttttttatatttcttttggtatatacctagtaatgggattgttcggtcaaatggtatttttgcctctaggtctttgaggattcaccacagtgtctttcacaacagttgaactaatttacactcccaccaacagtgtaaaagctttcctttttctccataaccttgtgagaaactgttgttttttgacttttaaataatagccattctgactggcgtgagatggtatctcattgtggttttgatttgcacttctctaataattggcgatgttgagctttcttttcatatgtttgttggccacgtgatgtcttcttttgagaagtgtctgttcttgtactttgcccactttttaatttgtgtgtgtgtgtgtgtgtaatgtttgagttccttgtagatgctggatgttacacttttgtcatatgaatagattgcaaaaatattctcccattttatatgttgtctgttcactttgatgatagtttcttttgctgtgcagaaggtctttagtttaattatatcctatttgtcaatttttgcttttgtttcaattgcttctggtgtcttcgttaggaaatctttgcctgtgcctatgtcctgaatgatattgcctggattttcttctagggtttttatagttttgggttttacatttaagtctttaatccatcttgagttaatttttgtataaggtttaaggaaggggtccagtttcagttttctgcatatggctagccarttctcccagaaccatgtattaaatagagaatcctttcctcattgcttattttcatcaggtttgtcaaagatcagatggttgtaggtgtgaaatctcatctctggattctctatgctgttccattggtctatgtgtctgtccttgtaccagtcccatcctcttttggttactgcaggcttgtaggagagtttgaagttggatagtgtgatgtctccagttttgttctttctgcttggattgtcttggctatttgggctctttttggttccatataaattttaaaataggctgggcatggtggctcctgcctgtaatcacagcactttgggaggccaaggcaggaggatcatgaagtcaggagttcgagaccagcctggccaacatagtgaaacctagtctctactaaaaatacaaaaattagtcaggtgtggtggcatgcacctgtagtcccagctactcaggaggctgaggcaggagaatcgcttgaacccgggaggtggaggttgcagtgagccgaaaccccaccataacactatgcctggatgacagagtgagactccatctcaaaaaaaaaaaaaaaaaaaaaaaaaaaaagaaaatagtttcttctaactctgtgaagaatgtcaatggtagcttaatgggaatagcattaaatatctatgcacataaactagaaaatctagaaaaaattgatacattcttggacacatacaccctttcaagaccgaaccaggaagaaattgtatccctgaatagaccagtaatgtgttctgtaattgaggcagtaataaatagcctaccaataaaaaaaaaaaaaagcccagaaccagacatataaacagctaaattctaccagaggtccaaggaagagctgatacgatttctactgaaactgttccaaaaaactgraaaggagggactcctccctaactcattctatgaggccagcatcatcctgataccaaaatgtggcagagatacaacaacaaaaaagaaaatatcagggcacgatgcttgatgaacattgatgcaaaaacctcaataaagtactagcaaaccaaatccagcagcacatccaaaagcttatccattacagtcaaataggcttcatccctggggtaaaagattggttcaacatacacaaaccaataaatgtgattcatcacataaacagaacaaaagacaaaaaccacatgattatctcaatagaggtggaaaagtgtttgataaaattcaacatccctacatgttaaaaactctcaataaactgggtattgaaggaacatacctcaaaataataagagccatatgtgacaaacccacaaccaatatcatactgartgagcaaaagctggaagcattcctattgaaaacaggcacaagacaaggatgccctctctcagcacttctattcaacatggtattagaagttctgccagggaaatcaggcaagakaaagaaataaaagrtattcaagtagaaagagaggaagtcaaaccatcttgtttgcaaaaaaagtgaacctatatttagaaaaccctattgtctcagtcttaaagcttcttaagctgataagcaacttcagcaaagtctcaggataccgaatcaatgtgcaaaattcgctagcattcctttaaaccgacaacaggcaagcagaaagccaaatcatgaatgaactcccattcagaattgctacaaaaagaataaaatacctaggaatacagctagcaagggaagtgaaggacctcttcaaggagaactacmaaccactgctcaaagaaatcagagagtacacaaacaaatggaaaaaacattccatgctcatggataggaagaatcaatatcgtgaaaatggccatactgcccaaagcaatttataaaattaaacatctttcaatgaaattgggaagcattatcaaaagtcttggatatttacatagtgaaacttagtctctgctaaaaagtcttggatatttacatagtgaaacctagtctctactaaaaatacaaaaattagtcgggtgactaatttttatgtgacttttaaaatttttctgtaaatctgaaattccaactgctattatttttctttcccctgaaatgtttcttcagtgttttatttggtgcagacatgctggcaattaatgctctctgatatgatctattgtaaaattacttattgactacattttttaataatattcttactcatattgaatactaatttgactaatttttccttcccttcgagtactccaaagacatcactggtttgtcttgtgcattattttttctaagaagttttcagtcacttttataatagtacctttgtatgtgacatatctttttattccttagtagtcttgggattttctttcttttttaaaatttataatattttgactagaatatttcttggcatacttttccatatatttatcctctttgtaattcattggacttcttagaactgtggtttttttcatcaaacttggaaagttttagaaaaataatttctcacatatttttgtctttcccactttttcttttctgagactccagctgcatgaatgttagaccacttgatattgtcaaacagataactgacactgtaggtttattttgcagtattttttctctcagattttatcctgaataatttctattgacctatattcccactgagtaaacccttctttggtgattcattcattcttcttttgaaccctttcagtgtattgataatttaatgtatttttcatatctacaattttgattttgttctttttaaaattattttcagtttactgccaagattcctatttgttcttccattttttctttattattatgtaaattttgaacatatttgtattagttacttcaaaaatctttgtctacttgttccactattttggtgatctatggattgatttcttttggatcctattttcttgcttttttgcatgtattgtattttattatactagacatgttttataggaaaacgtttttcccagagagtgagagctctgccctacatttggtaacaaaagggaggcagtaataattcagaaattattaatatcgggtgagtgtgtgattgagcctcaactttaagcagattatgttcaattttgtttatgtcaacttcaatctcactgtagtagctgcctaggaaattgtctttttgactagtttgtgagcctagattcaaagctttctagcactcttagaaatacatactctcttaagaatacatacattctttgttgcttttcaagcctatcttcacttcccttttctcagtaaacttgggaaagaataaggtaggaagactttttatgacgtgcaaataatactgcacttgagaatttttcaaatccatctttcctggctgatcctaccgttatccatagctctgttgaccattttttaacaaggtaagtttcttgatcattggcagatctccttttctgttccctgcacctgcaccatttgcccctgaaagctgctgtaactcaccacatatcagtagtcctacaaaatgtatgtcttttatactctctagattttcttggtgttaccatgagtgcaaagtcaactatctatgtttctttacattctaaatcacaggcagaatttttctatttgacttccctctctaagtccttgtctccccaatagtgataaagggttagcactccactttataatttttattttactcatattcaggtataccatttatttgactaattgtagataattgtcatggttttatattttttcttaagaatacatgcaatttacttacaaagtataaattttattttggtattttgacattacattacctggtaaatataacattgtaatagtatttatttccttgtgcttccccacaacaaaaataaacttttagctagaggccatttagtatgcttcaattttttwaaataaaattaagaaaaattgattttccttttataaaatatatttccctaaagctrttgcttcttttgagaattactataagaaacaaaattccaataagtataagctctaactttgttactcctatattttgtggtgaaagtattatggtattatagaaaaagcatcaagggctttggtttccgaaaaacagggattaatatacactctctacctcttagtattaatagctttgtgaccttgggctggtcatattctcatctataaaatgggggtaatggtatttacttcatagagtggctgtgaagcttaaattagttttcaaggcaaaatatctatacctgtatttatacagaagttgtccaagaaggtacacaaacccagaaaaagtatggctgactttcctagatcattatgtggagttttgagggaaaagtatcttaatattacatatttaaaaaaatactttttaaagatgaagtatgaaatgataataaatttggtgtggggccgctgaagccatccctctaaatcctatatccccatatgtaattattctgtagcccctgagaagtattttagtgaaaatatctgagaaactctaggctgacctataaaacgtgaccagaattatttggctcacagtatgtgttaggattagctgtttatctagttacttaattgagtgaatacctgggacataatttagctttagaattttttttagtcagtaatgtgccacgctttgttgtcaacatttagattgttttccctttcatatgaaacattttattaaaattcccaaacatcatttttaagtccaatagcattcaaataccttctgcttaggcaccttcctttgtaaaaattttaattgtgtcttgactctttggaggcttttttagtgatttgtatttgatttgtttccctgggtggcatgggaatcatgatgtcattctttccattgtcctggtcctggattgaataacagaagatccttaacttctggagaacaaattttaaaaatggctatacaaattcattgagttttaactatgctatcatcattttgtgcatgaatgatttgtgttttatattttgattatatatatagatcacctcacacatcatagagccttccttttcaaaaatggcataatgtaagagtcattagggacccattcaaaggaaatgaatatattaggtatgtggacctagagataatttggaaatcaaccttcacttctcctgtatatttaatataccttgggtcatagcttagtataaaaatactcaacatatggttcaaagccttctatttaaaaaagatattggaatgatcattatttcaatttctttctttcgttttttttttcttttctttctttttttttttttttttttgagaaagagtcgcactctgttgcccaggctgaagtgcagtggggtgatctcagctcactgcaacctctgcctcctgggttcaagcgcttctcttgcctcagcctcccttgtagctgggattacaggcgtgggccaccatgccctgctaatttttgtatttttagtagagttgtttcgccttgttgactaggctgatctaaactcctgacttcaaatgatccacccgtctcggcctcccaaagtgctgggattgcaggtgtgagccactgcactcggccatcattattttaatttctaaccttgtttctttaggaaacactctataaacataaataaatgtaaattatagaaataactactttcttttaatttaaggtaaattatactggcacatatactgaaagtcaatcttcctaaaataccagttagttaaattatttaaaattcttcaagtttcctgttagcagcaggagaaaattttatttctgaaaactgactaggaaataataccctgcatctcattccctggagtatactccattattcctcagtagtatttcttctttttacagtacaaactggctttttaattgtctttcattctctttgagagttgttttggccgctcaacactttctcacacagttctccttgcctagaatgtcctgatttctttttctcttacccctatacccatctgtggtagtccagttcaatcttttctgtctgttgagttcctgtgacattgattgtaagttgtttcttgtctcttgagtcagatagcaaaggggaccatgttttatgacagttatcttccagatgagatataaaagtaactcgacacttatttaatgctgggttaaaaattataaaaagcactcaaaagaatgaagtctttcttgaaattggggttaaattttttaaaaattactggaaataaatatttgatggcttctataacttttccctgatttcattgatttaataatgatctacatacaaataattttattttggtgttggttttatgttaagcacttgttttctttatttcctcatccaacatgtaywcattgttggtccagttgtgtcaggagttctatgtcctagaattataaatgcaaatatagcaggcatgatccttgcacttacagagcttaataatctaatggaagaaaccaacattaaataaacaaacacacacataatttattataattatgttaaaagctgcaaggaaaagtggagggcatcataagagcatataacagaagaacctggcttacactggggaggttgctgcagaagtttcgtgtggaagtgacatatgcgcaaacatgtatttatcaagaattgtcgtaattacacagtatggatttttatcccaattttctagatgagggcactgaggtttagaattgttgaggaactaatataagtggcaaggttagagtttgagcctagcattgtgtaactatgggacctctttgtgcacagtacctccctttcagaaagactcaattccaaaggagaggcagagaaatattgggtaggcggagaagagtagaggcaaggctgggcacggtagcttatgcctgtaatcccaccactttgggaggctgaggcaggtggatcacgaggtcaagagattgagaccatcctggccaacatgggtgaaaccccgtctctactagaataaaaaaaaattasctggacgtggtggcgtgtgcctgtagtcccagctactcrggaggcygaggcaggggaattgcttgaacctgggaggcggcaattgcagtgagctgagaccgcrccactgcactccagcccggcaacagagtgggactccatctcaaaaaaatataaataaataaaaaaatgaagagtagagggaaagtgagaggtgacagtgtgctagcagccctcgcttgctctgggcacctcaggccacagcatccattctggccacgcttgaggagcccttcagcccgccactgcactgtgggagcccctctctgggctggccgaggcaggagccatctcccsctgcttgcagggaggtgtggaggsagaggtgcgagtgagaaccgaggctgcacgyggccaggacgagttccgggtgggcgcaggctcaataggccccgcgcttggagcagctggccagcgccgccggccccaggcagtgagaggcctagtgccatcaactgcccaagggctgaggagtgtgggcgcagggtgtgggactggcaggcagctctgcctgcggccccagcgtgggtcccagtaggcaccagatacactaggcaaagccagctggggtcctgagtcaggttgagacttggagaacttttatgtctagctaaaggtttgtaaatacaccaatcagcactctgtgtctagctcagggattgtaaatgcaccaatcagtaccctgtcaraatggaccaatcagctctctgtaaaatggacmaatcagcaggatgtgggygggccagataagggaataaaagcagactgcccaagccaacagcgcaagccactcgggtctttgttctttcactgtttgcaataagtcttcctgctgctcactctttgggtctgtgccacctttatgatctgtaacactcaccatgaaggtctgcagcctcactcctgaggccagcaaaaccatgaaccsaccagaagaaagaaactccgggcacatctgaacacctgaaggaacaaactccagaggcaccatctttaggaactgtaacactgaccgcaagggtccacggcttcattcttgaaagtcagcgagaccaagaacccaccaattctggacacaaaaggacatagagagtgagagaagggaaaagagaaaggatagagtataggaggaagagaagcattaccctaattatgatcatcgaaagattgattccccatccagattaagttggcttcaaccctgtattagtttttcgtttccttgcaggtgaaataggatgaagaattatattgtctctggttcttccatctttgagtctgtggtcctttggccattaatccactcagcaaatatttcctgagcatgttccatacgccagcagtcctctatgtgttgatgattctgtggtaatgtaggattcttattttgaggaagtgaaacaacaacaccccttgcccaaaggtagagtaattggatcagtgccttcataaaaaatccaaaagttgtacaagcttcagtagggacacagtgtaacaaaggatgatatttcttatgaaacatctacattattgttgttttgaccataatttcagctgaactggttaggatagtttaatttgacctgtaccagactgtaggctattccctgtacagcataggacccagaacaaactgtgatgtttcttaggtaaaattctaataaaatcaaatatgaggtttaatcaaaagtggaraataattttgaagtattccatagaagacagaattagttgcattagctttgctcttagggtggatgattcactgtataataacaatgaacacttctccattatttattatatgccagccattctyctaagcactgttttcacatcttgactcatttaacccttactgtcgggtccagagttcctgttttaattatcaccatacacttcccatccaggcatcttctctctgtcctgcttatgtgttagtttaatatcttcgaatctcaggtccagtctaacaccaggtgatgtggctgggttgttttcccttaaaattggcctccctgaatcactatctagatccatgattgtagtgaatgttcccttcctaagctcctgccagagttyggggccagggatgtagtcctcatttattattattcaacaatgactgtctaggattccattaataatgtcaaatagatatcccagtaccrctgtccaagaccttaggtgctcaataaattctaattgattaactgacctatcaactacatgcattgttagccacttcagcagatataaaaatcactattccatgaatataaaattcactaattttttttaattttaaagcaggcatttcaatagagtagtttctaatatagagtttattatgatttcatgtgggaatagttctttctctccccaatttctaaagagttgacattacctaaagaggaatatgtattgtattcatcatgattaggagtgtttacatttgcagtcctctgagatgtcaatatagtttaattcataagaaacatttgatttaaatttccttacttcccaatttctttyatttttttatttttttattttttgagatggagtctcgccctgtcgcccaggctggagtgcagtggtgcgatcttggctcactgcaacctccacctcctgggttcaagagattcttctgcctcagcctcccgagtagctgggactacaggcgcctgccaccacgcccagctaattttttgtatttttattagagacaggatttcaccatgttagccaggattatctcgatctcttgacctcatgatccacctgcctcagcctcccaaaatgttgggattagaggcrtgagccaccgtgcccagcctttctttgccaatctcttctgatcataaaataaaatatctcattataaaaaggcccatatattctttacrtgcatgtagttttctaaaagaacagatattagatgctgttaactttactcagaacatgttttagatgtcgctgttacttagcaaaccccaaattatcttaccattatgtggaggccaactgtcaaaagttatctagaaggaaactgtcatatactcacccaccccctgtttactaaaagtattttctccttataatctaccttattttttaccttggggtggagaatatttgtcctcttttccttatcttctgtatcacattagttttcttacttgtcccatgtgcagcagtagtatcttaatggaattctttggattaatgtgtcctttaaaattttcatttatgttctagcaaatctgtatagtgctattagaatgacccacttttataacaaatggggctagttgataagaatagccaggggaaattccaaaatgttactccgtgctcagcattttttttttttaagtttcagcagcagatttaacagaagattctatacacaaattacagtttgttcttcagttgtttgacagaatgttaagcttaactaaatgtccacagttctccctaccactccactttctctacccactttgtggctttgcgtaacagactgtatgcaggtgtcaatgattatttattaactgttaattgccatctatttcaggatccctgaaacaattatttaatgtaagctgctttttccagctaagacttttctttaagaaagtgtcataaacggtttgataaggtatttcagaaagttctaactttggatatttgtattagttcatttgcaaaccaggcttttctagttcccacatatgtgttcttttaactttgaggaagtttgggcgaggtttgtttaacaaatgaaataatgttctactgcagtttctaatgtagtttttgaaagagtaataaaagtcatcttgtccacaaatctggcattctttccttttaaaaggcagctatatacaaattatttttctttctgattgccagttaaagtcatatacagtagactcaggaaggaaagactaagtccatttgaataattctatgtgtagtcatatcttgcaaagtcacatgaacaataattttcctttggtcttaaaattaaaatttctgatataaatgttttatacattaaaaaaaagtggagatcaaaactcagttacctgaatatagaaattgagaaactgaaatccacataaaaaaatctgactttctccagattgcacatttggtaggcagtagagtcagggctaggatccaggtcttcagattcctacaccacaaaccaaactgcaatttaaatgaacaaagttttaacttcttacccatttttttgaactgatgttctttattcttcccttaaagtaatatcaaagtttggtcagtacatacttaatgaacgtgtttattttgatgtgtgcaatactaattgaccagcattcattttttctctttatcaataaactagtatatccaactagattattacgatagctgttcctatttttctgaaatcttgagagaaacttaccaattgacaagggagtgagggaagaggaaggaagtaattttgattggaaggaaatgttggccaaaaggtcacttaactaccctttccttttagctccagaacattgcagattgtgcatctcctaataggaaatgcctgtgggcctccagaagcagcccaggcagttgctatttccattgaatgtatatattagccaattttctgaaaaaggaattttcatgttctcaaaacattaaaatgtctgaaaattgtacaactctgaataacttcagcaaacttatgtatgcaacatgacttacataataagttccaagaattattcttctttgatttgacttttcaacacatggcatcatcactaacaattctagagggggaaaaagacccagtaatgcgtgttttcacttgctttctggktccaaatccaactttgtaaccttgaggttcattaaatcggatgcaatttggaaaatacaaaatttaaactttgtaaccttttctagtcatagtaaagtccttgtagtacaaggagtgcatttgatgcttatatctttttctttctgtctttatgtatgctgagccacttatctggaattctaaataaacttctagagtatacttactctctctccaattcacttttttttttttgactacttaactttctagactaagcattatcacttgtgcaagacctttatctggctacttcctttaagtcaaacagggctatatgtgtcttctatggactcccatactaccatctttctatcttgacacttaccttactgtgcggtttgtccttcacactagtctccaagcttttttttttttctcctttaatttttaagttctgggttacatgtgcgggatgtgcagagttgttacatagggaaacgtgtgccatggtggtttgttgcacagatcatcccatcacctaggtattaagcccagtgtccattagctatccttcctgatgccctccttccccccataggcctctctgataagacccagtgtgtgttgtttcaccatgatgtatccatgtgttcttatcattcagctcccacttacaaatgagaacatgtagtattkggttttctgttcctgcattagtttgttgagaataatgacttccaacttcatccatgttcctgcaaagaacatgatctctttcctttttatggctccatagtattccatggtgtatatgtgccacattttctttatccagtctatcactggtgggaatttaggctggttccttgtctttgctattgtaaatagtgttgtagtgaacacacacttgcatgtatctttataatagaatgatttatattccttgggtatatacccagtaattggattgctggrccaaatggtatttctgcctctaggtctttgagggctcatcacacattcacagtgattaaactaatttacactcccaccaatagtgtaaaagtgtacctttttctccacaacattgccagcatctgttgtgttttcactttttaataatagtcattctgacaggtgtgagatggtatttcattgtggttttgacttggatttctctaatgatcagtgatgttgagctttttattcatatgtttgttggctgcatgtatgtcttgttgacttctgacttaatttcgttatttacccaagattcttgaaagctgcttaagcagtaagacgttagcatcaaccatccatccattgtcctaaaattagaactgaccatctttgcacctgcagtatycaatatttccagaacctggtagaccaaaacatatttgaatagaygaataaataaacaaataaggaaattttattagttaatgggcttcattgcatagcttactactctttggtgaaacttttctgctagtgaaatagagaaatcagtgacacttcaaagggctttcaaaaagaaggctctgggtgattattgagggtatactcaggcaagccttgctacagactgtcctccctttttttttaaataaataatcactgagtccaggctttttgcttagtggctgcttctttaaggataatctggcaaaagaataagcatgtctttgccaaagcattcccgttgaagaagtgggaggagcaaaagagaatatttagggagagctgtggctttgggtttgcaattttgaagccagtttttgtaaggaataagtctttatttttcactccaatattagctcagtgggaagaaattttcttgcaatcttgggaaaattcactgaagttcccaaagattctgaaagagtctggaaccaggagttaaaaaacaagaatgcttgctcaactccatacatttattagctgaacttggtcaatgtgcttaacctctctaagcctcagtttcttcatatttaaagtggagataaaatcattcttacttcatagtragataatatatgtgagagcatctggagatgcaatcatgaaaactaatggttattacttaaaaatgtgactgtaattgagaggttaaaaataaattccaaattgttagtttcctaaaattcagatttttagatggacaagcatattgagtattcaaatgcttttctttgcatatatccctatataaacatatacacctaaagcgtataactatattttgaagtctaagtggctccctcaaggttgctaaaactagtaactggatcttgggtcataaatgttatttttcataagaccactttgcatatttggatagaggcaactttataggaatctgcttttaaatggatttgaatgttgactggaaaccagcagcaataattgtatcctatttgattttgggaaaagctgaargctgtgggcattctgcaaagatttcaggcagtagtggttacattttagagtctttctacagctctctccaaaagaatatatgccacgttgccaaggtaatttcccttatgctgagcacttcctattttttagtcctatgtttaaagcagtcagataaattagccagggaatattcctgttctattgattaatggttttacatagcctgaaggtctttaccactaactctcatccagatacccatcattacctttaacagacaagaggtgtaaagcagtctttattttttttatcctaaaatcctgttcatatgagcagattttgctgatgacaataccaggaatacttagcaacattgagataaaatttttcttggaggtagacataagaagaaatgggttcttgtgtgtaaaatgaattttctctcttggttttaagatgaccaaatttcaaaacagcaattgggtgaaacagtccttggtaaggtttgatttctaactcagaaaagggggatgcttcttttattctttgtgatgacaagggagaaaatccacacaagtacactacctctgaatctttataagccctttgatttcaaagaaaattgacaaaccaccttcaagagcctttacaactaaatatatactcttgaagtagaaaccacattttatttaccttcttttgtaagtctagatatctggaaaagtatcatgacattaatgaatataataaagatataccagctctgttattaccaatttttagtaagaaataatgctatcaccttctcactttatttcagctggaaatgtctacatctcaattttaatttctatttatatataatactttacttatatatttatataaagatataatatttaatttattttatacttaaaaattatgcctgggaattttggcaaactcattaaacatcagtgtgaagtgtactttattaacgcccttaacacttaccatacttctttctggttgtgagattaaaagccagttgagatggacaactgaggggtgcatacatattttcagaaggacatttttagtaattatatttacagctttgctaccagcaggtaatttttagctaccattcacttacctaagcttatttatttctggttyaaaaataattttccagccttaatacaatgtttaacatactactagtagtttattgaagctgataattttggcaaattgattatataaatatactgttcaaaaaatccattctcattcattctgattatatttgcagcctgtaactcgaactggcaatctagataggaggagtgttcagagacggatcatatactaacttatctaatattcgtagaactctgtggggtattagaggtggttcataatgcccctaggattttgcccagcctgaaagatctaggtctgacaaacttcaatctaacaaatatttatagaatacctattatatagtattactattaataataattattttctctctctgttgaattggtattataaatgtactttgtctttrggaagactctttttgtcctaaattctaagttgtctaatatcagtatagcygctccagctctcttaggtttatatttgcattcatttttaaagaaaaatgaatagattttcagaaacctgtgggacaacattatgcatactaatatatgtatagtggaagtacagagaaataacaaaggaaatgggtagaaaaattatttgaaaatataaaggacccaaatttccaaaacctgatgaaaaacattcatttacacatttgaaaagctcaacaaattttaagcaggataaacacaaagtgacccacagctacaaatgtagtattcaaatgctgaaaagmgaaaggcaaagataaaatcttagaaatagcaagaggaagtcaacttgtcatatasaaggtaactacataagtttaacatctgacttctaattagaaacaatcatggccacaggcaattggaataacatatctaaaatgctaaaagaaaagaactgataacgaagagttttggatccagaaraacaatcctttaaaattaaaagggaaacaaagacaatcccaaataaacaaaagactgaatttgtttttagcagtcttgccttagaaacatttccattgataatctaaatagatgcaggaaaggcctttgacaaaattcaacarcmcttcatgctaaaaactstcaataaattaggtattgatgggacatayctcaaaataataagagatatctatgacaaacccacagccaatatcatactgaatgggcaaaaactggaagcattcccttcgaaaactggcacaagacagggatgycctctctcaccactcctattcaacatagtgttggaagttctggccagggcaatcaggcaggagaaggaaataaagggtattcaattaggaaaagaggaagtcaaatcgtccctgtttgcagatgacatgattgtatatctagaaaaccccgtcgtctcagcccaaaatctccttaagctgataagcaacttcagcaaagtctcaggatacaaaatcaatgtacaaaaatcacaagcattcttatacacaaataacagacaaacagagagccaaatcatgagtgaactcccattcacaattgcttcaaagagaataaaatacctaggaatccaacttacaagggacatgaaggacctcttcaaggagaactacatatcactgctcaatgaaataaaagaggatacaaacaaatagaaggacattccatgctcgtggataggaggaatcaatatcatgaaaatggccatactgcccagggtaatttatagattcaatgccatccccatcaagctaccaatgactttcttcacagaattggaaaaaactgctttaaagttcatatggaaccaaaaaagagcctgcattgccaagtcaatcctaaaccaaaagaacaaagctggaggcatcatgctacctgatttcaaactacactacaaggctacagtaaccaaaacagcatggtactggtatcaaaacagagatatagacgaatggaacagaacagagccctcagaaataatgtcgcatatctacaaccatctgatctttgacaaacctgagaaaaacaagcaatggggaaaggattccttatttaataaatggtgctgggaaaactggctagccatatgtagaaagctgaaactggatcccttccttacaccttatacaaaaatcaattcaagatggattaaagacttaaacgttagacctaaaaccataaaaaccctagaagaaaacctaggcaataccattcaggacataggcatgggcaaggacttcctgtctaaaacaccaaaagcaatggcaacaaaagccagaattgacaaatgggatctaattaaactaaagagcttctgcacagcaaaagaaactaccatcagagtgaacaggcaacctacagaatgggagaaaatttttgcaatctactcatctgacaaagggctaatatccagaatctacaatgaactcaaacaaatttacaagaaaaaaaaactcatcaaaaagtgggcgaaggatatgaacagacacttctcaaaagaagacatttatgcagccaaaagacacatgaaaaaatgctcatcatcactggccatcagagaaatgcaaatcaaaaccacaatgagataccatctcacaccagttagaatggcaatcattaaaaagtcaggaaacaacaggtgctggagaggacgtggagaaataggagcacttttacactgttggtgggactgtaaactagttcaacccttgtggaagtcagtgtggcgattcctcagggatctagaactaaaaataccatttgacccagccatcccattactgggtatatacccaaaggattataaaacatgctgctataaagacacgtgcacacgtatgtttattgcagcactattcacaatagcaaagacttggaaccaacccaaatgtccaacaatgatagactggattaagaaaatgtggcacatatacaccatggaatactatgcagccataaaaaaggatgagttcatgtcctgtgtagggacatggatgaagctggaaaccgtcattctcagcaaactatcacaaggacaaaaaaccaagcaccacatgttctcattcataggtgggaattgaacaatgagaacacatggacacaggaaggggaacatcacacaccggggcctgttgtggggtgaggggagtggggagggatagcattaggagatatacctgatgtaaatgaggagttactgggtgcagcacaccaacatggcacatgtatacatatgtaactaacctgcacattgtgcacatgtaccctaaaacttaaagtataatttaaaaaaaagaaacatttctattgatatatttccaagtttacttatgttttttcttgtcaactcaaatctactgttgagctgctctagtgaatttttttaattaataacttttttaagagcagttttaggttcatagcataactaaatggaaagtacaaagggttcccatatacctcctccccacctaacacacacacaggccttgctcacacgggcattgacatccacaactgagtggtaaatttgttacaactgatgaacttacagtgacacatcattatcactcaaagtccatagttaacagtatagttcacttttgttcttgaacattttatgagttagaaagtatttatgagttagaaagtattttttgtgcttctcttttctggaagtgattgtagataattggtgtaatttattcatgaaatgattgttaggattcacctttgaacccatctgggcctggttctttctgtttgggaaggttattaattattgattcaatttcttcaatagatataagcctattcacatggtctgttttatcttctttgagttgtggtacatggtgtctttcaagaaaacagttcatttcaccttggttataaaatttgccagcataaagttattcagtatattctcttattatccttttaatgaccatggaatctgtggtgatgttttgtgtttcttttctaatattagcaattttgtcattttttttcttaattagcctagctagaggcttatcaattttactgatcttttcaaaaaatagccaatattttgttgattttctatactgattttctgttttcaattttcttgatcttctctaacttttacttcttttcttctgcttactttggatttaatttgcccttccttttctagttttctaaagtagaagcttagattattgattttagatgtttcttcatttatatacattcattcgatgctatgaatttccctctaaacactgcttttactgaagcttattaattttaatacattctatttgctattctttttctttttctttttttttcttttttgagacagggtctcactttgttgcccaggcttgagtgcagtagcatgatcagggctcactgtagcctcaacctcctgggcacgtgatcctcctgcgtcagcctttcaagtagctgggaccacaggcacaagccaccatgactgcctaattttttttttttttaggagttggggtctccctatgttgcccaggctggataaaacatcatgtattcaatttcatttagttcaaaatactttccaatttctcttcagatttcttcttttacccatgtgtttaatctccaggtacttcataattttccagctgtctttccattattgatttctagtctaattatattgtggtgttaagaacagacattgtatctattcttttgaacttgttaagatttgttttatggcttagaatttggtctatcctgatgactgtttcatgtaagtttgagaagaatgtgtaatctgctgtcattgaatgaagtagtctatggatgtgcttgatatcagttgtgtgatggttccatggagttcaaatatatccttactgattttgtgcctgctaggcccatccatttttgatagaggggcgttcaagtctccaactataatagtggattcatttatttcttgctattctatgggtttttacccccatgtattttggcactctgttgttcagcccatacatattaagggttgttacatcttctcccagtattgactactttattattatgtaatgcctctatttatctctgataatttatcttgcgttgatatctgctccacctggaattaatatagctactcccactttcttttgattagtgttattatgatatatttttctccattcatttactttttatgtatagttctccttacatttaaggtgtttttcttgtagacaacatacagtcatgtcttgctttttaatctaatgtactttgaaaatcttggctcttgaattgatgtatttataccattgatatttaaagtgattattgatgtatttactacttggattaatatctgccatatctgttaccmttttctaattactgttctaattactgttcttgttctttcatcctatttttgtcttccacactttttctgccttttttcgttttaaatggcattttatattatttattttctttattaatatatcaattatacttcttcttttactttttcaatggttgccatagaatttgcactacacatttacaaccaatccaagttcactttcaaataacactccaccacttcacaaatagtacaagtgtcttataacaaaatattccccattctgccatagtttcttgtattattcatttcacttatatataatcatacatgattataagtgacatgcatatatatgattatatataagtgatcatacatatatgtgtatatataagcacatatatataatcatatgcattattcctattattattttgaacaaactgttatctgttagattaagaaaaataaaacttttatwttgtyttattttcatatattctttctccagagctctttctttctttatgtagatcaatgtttctgacctttatgatttttcttctctccgaagtacttactgcaatatttctctcaagataggtctactgacagaaacatttccttaatttttgtttgtctgaggaagtcttttctttttcattcttgaaggataattttataaatttttactttggtctttttctccccacactttmaatatttcacttcactctcttccagtttgcatggtttctgggggggttcagatayaatttttatctttgctcctccgtagatatggctcccacctgcccccactagcttctttcaagactttaaaaaaatccttgattttctgaagtttgaatatggtatgcctagatgccagttattgggagtaggaggattttttgtttgcttgtgtgtttgtttgytttgtcatttattctgcttggtgttctctgaggttcctggatctgtgatttgttgtctgacattaatttgggtgaaattytcagtcattattgcctcaaatattgcttctgtttctttctctgttttgtctccttctggaatttctgttatgcttatgttacacctttgtagatgtctcacatttcttaaatrttctctattggttattttgttytgtgtcttgtctttttttctctgtttttcaatttggaagtttctattattgtatcctcaaactaagggattcttttctcagccacgtaagaatcaaaagtattcttcatttctttactatattacctccagcattccatttttattccttcctagaatgtatctctctacttacattattcgtctgtccttgcctagttgtctagttttttcattaaagcctttagtatactaatcataattcaaacatttctgccgtatttgactctggttctgatgcttgttgagtctcctcatactgtattcttttaatttttagtatgcctggtcattttttatttaaaatgacataatgaactgaataaaaggagctgttttgaatagatctttggtaatgtagtggcaaggtattggggaggaaagcatgctttattcctgtgattaggtttcagtattttggtgagtttgtctatctggattctaratttcaccagtgcttctctgttgtcccccttatccccaattttaggtgagacaggatggctagagggtctggacttgggtatttccctttccccagttatgttaggccctggtaaaaccccgacaggttaggctctggtaaaataatttctcctgagagaagcccttattaagaagcactgaatgctctaacctacttcagaatgattccttttcctcttccctgccagagcactagtagattttcttctaatattcaatacgaaggcctcgtagagctttaggcagtaaaactcacaaaagcgtggcggccctgtgactgttccctctggagttcatgactgtcagagtttttcacattgagcatctaacaattcatcagttatagttcaggtttttctaccctggcactggttcccaaagaggtatctgcccattggtttttgctctgataattggtgattctttgtgtctacctatctgactgattttggggacagtgatttgccttgtaacttaacttctctgatggatctaacaatagttgttgatttttcagtttgtttagctttttatttgttgttagaacagaatggcaacttctaagctatttatgtagtaggccatcagccccaaactctagcaaatttattatttcagtttttgactccaaaattttcatgagattttgatttataatttctatttctytgttaatattttcaatttgatgtgtcattgttgtcatactttaatttttttaaatggctcttttagttctttgcacatatttatggctgctttgatgtttttgttagctaattccaacatctggaatgcctgagaaatagcttctatttattgcttactttcttatgtatggatcatcatactttccttttttgcgtgtctcctatatttttttgaaaactctacatataagataaaagcaattagagattctgatttgccctcttctctcttaccagctccagattttgagggtttttaaatgttggtttaaaaactaacatttagtcacatgctagatctgtagtctgtttcccctgcagtatatagctactgatgtctctgatgagtctgtcttgttttttttttcttttttgttgttgttgtttttgaagcctggcatcatagcagtgcctttagatcaacgtagccagatggtgagccagtgattggtgagaggttatgctgaaacaccttgagccagtaagccttccatccttcaccaatggatttgtgagtgggccagggaatgtgtttacattcaagcagcctacaacttggcctgagattttattttcgaataggccttccttttcctatctcctgtgcatgtgtgcaaggtctcacattcaggcagggatatgttgattgctaggaccttctgtagtctcttgaggatactcacgacctttcatatgcactcaaacttccagtcttccatggaaatataggagctctcaaagcctgacataactctctaagtacccaaattgttctgttaaatttctggctactgtagacagcatgttgactgcaccagccagtattgcaaccttakactacttccatttttgctttccctgaagtttgccactgaaatcactattgttttcaaaaactatgcatgggattttcccacattctgctccaaatgaagttggccccctctggcagtaaagctgctggttttcatagcattttctgctggtagaactactgtacccacagaattttgtggggtgggaagagatggggcaatgtgcagccccagactggaataacacaggctctcacagttgttaactaacattcagcagttttttttttaatcaatcatttttaacttgctatatgtctttagtcagttttcaaagtccagaaatggctattgttggcaatttctgcccagttttaaagttgttctttggggacaggatttgctgagctccctattccaccagtctgtaataataatgaacagtataataataacatttatcatgtgccagactactgttccaagtattttactaatttatttaaattaatttacactaatttactagttcatttatccttcacaatcctatgatattcattttgaccccacttacagatcagaaaactgaggcagatatctgacagctattaactggcagagtcaaacttaggaaatgtctctagattatgagcagttgagaactgtactttacttcctacttcatttataatccctaacaaccttattgaagtaagtataagtagtatcgtaatttattgaggaggaactcaggctatttaacttttctaaagtcacaaaaattattaagaggccaatttaggattagcctacatgtctgactgaatccaaagcctgagctgatacttaacacagcctgataatataatcagagcaaaaasaatctacagaagtagtctgtaaacacagagaaacagcattagcagagcctggcctgtgtatatatgtgcatgcatatgtgtgtattagagtgcgtaggagggctagagaaagaaaggcagggtttgtgatgatattagatggaaggagaggagaatcatggaagatgtttttaaaggctaagtaggagttatacagggaaaacttggcaagcaaraccatcctaagcagaggatgattaagaaaacaaagagtataatgaaaacatgatttgaattttcttccatctcttctccctgccctaccaactgctttcaatccttggtgctttttgctgtaagtttgttgtctgattaacatttgtttactatattaaaggagtatctgtagtttaattaatagaatgcaagtgaaaatttttctggtacccttttgagtcttcctattccaagaagatatgaaaagaaagaaaataaaagaaaagaaaagaaaaggaaaggaagggaatggaaaggaaaggaaagaaaagaaaagagagagagcaagcaagcaagcagcagtgagctatgcttgagcatgaactgttagaaacttatcctatcagcgtcccagttgaccctgtgacagaatacttaaaggtcaacaaagaaaagtgtccagagagagagaaattctgtctctgagacttctagagatagaattggtgcataaaattcagartccagaacgccttaatccgactagctatcacaacttgagtatgcatgacccctttcaaactcctggatcaagtctgagaaacactaatagatatgtagaaacttctacatttttctttgaaaaatatattgcttatacttttttgtcactttagacttctaagttaattgaatctaacagagaaaaaacagggtaagtcaggtcttctgtatgaatattgaacacaactgccccgtgcatatacgtatgtgaatatatgtatatatacatatatatacaccaagcagtaaagcttatatgttatatatgaaatatgcttatatataattatatgtaattatatatatgcaaatatatatatatatataagctttactgcttagcatatagtaaatcttcagcaatattaactacaattatttaaaaggttttttccaggtctgctattggcttatttaatttctacctcttcacctttcttaaaagagaccagtgtggcatgtatgtacatgtctgctagggggagggggatggtaagtgaaccatcaggtaaccatcaggaaactgatrgttattgcttgcaggaaattttttaaaacatcactatatatacgattgttataagaatccaatgcaataatgtatgtgaaaatagtatgaaaattaataatactgttgttaccataatctaaaaatgttagatataaacaactttaaaccttacaatttctatgttatcacctgggccagacattcggtaggggacaaaacctattaataagcagtccttgtcatggtcctaaagtactttgaaaaaggtgaaataaaataaagcagcagaatgctttcccttagtatctgatctggaaatactggtatgacctttattgtaacaagcagcccgaagcatttttcsaaaatcacagaacttcagatgaaggagcagggtgatgtggctctatagctcttttcccaaggttgtgaagatagtgatgtgctttttaaatgggatgaaaagagattatatgagatagcgaagaaggtgggggtagtcactcaataaatatttgttgattgatgaattgatcttgaaaactgctgaaagggtgacctatatttagatgaaaagggatgcagctcattgttagcaagatttgaagtaaaatgattagagagaaattaaggcagttcacgcctttggaaactgacagtggtaagatttttgaataaaagggattttaaagatatacagcaaataaaaagcctttagcataagagtcaatccatttatttctttaataacaatttataatgcggctactaggggcaaacataagttcagttataataggtgccataaaagaaacacaaatttaaaagatagttccccatccgagcaagaggacagtatgtcagggaagagaaatcacaatgtgaggagctggcaagaggaagaccacaagtatagtaagagaggtgctctgctatgtatgaccagaaagaaaaattattgttttaatgtcagatactggattcaaacactagatatttccatttctttctccatccctataggcactcatttgctaattttgttcaacaaatttatattgagcacatactttccatcagtaagtaaggatgaggatgaacaagattctcctggtttcacattgcttatgaawgcataaccttgaaaaaattgtttaacttagaaactagcttctttgatagtaaaatcaacattaaaatgctaagctctcaaaattgttacaattattagatgaacttaagatagtgtctggcatgtactacatatttaacaaaatccagtagtagcaatagtagctgcagtagtagtaatcatttttattgttattagcattttttctggagataacagggttatgatttccagggtatcgataagaaaaatatttttgatttgatggacaagacagtctttagttggtaaaaatgggagmttcccacaccaccaatagaatgcagctccataaaggcagaggcctttttttgtttaccactatagmcctaggacctaacctaatacatgggaaattttaggcattcaaaatatttttctacattaattagaattttaataaacataaattgcattaaggcatttaaggcagcgtatgtggcattagtaaagataccaaaaggaggaggtgttcagctcaattacttggctagaaaacgtttttgaagaygagaaacagrgtatttagctagaaaggtaggttggggacagctggtggatggtatgaaatgttctctggggattaaaaaattattgaagctacttgagcagtaaaattccttgatgaaacattttaggaaaataaacctcaaaggatatgaagaatagattgatgttgaaaatcaataggggaagaagtatttttaggaagttataccaatgttcttaagaaagtgataatttgaacatgaaataggatggcgggaattgataacaaatgtaaaggatgtatatgacaaaaaaaaaaatctccttaacagagatatagagtggtagactgcaggaaattatggttacaattaggcaagagcatctgttctgttttagatgtattgagaccagggcagtacttaagtgtttactcagaaaaaaaaaaaaaaaaaaggccggggggtgaagtcaaaactcaggtagattataaaagcaacaarggacagagcttggcaaatgttcatatctggcaggagtaaaataaatggtcatcactgccgtggacagagcagtagggaggagactagcaaggatagaccctgtgatggaaggaaagggaagttgcgagtggtgggtggtcactctagtgccaaatactgtatgaaagccagggcaaatgaagactgggaaagatcattgtatttaaatgtgaaaaagcttttgttgattattttgggttcaacttttrtataatagtggaacacaaacaaaagctgcagaggattgaggagagagaggggatgaagtagagaacattgatattttccctcatgctacagtcatattatactcaagtaaaagaaaatattcttgactatctggttagatcatcatattcgtaaagtctcatcttttggcttagcacccagtttttatttccctaaatattttggctatgtgctttgagttcttgatacttttggacacttgcttgcaaatgaccacatgatttgcatagatgggtggtgaggtgagggaggagatttgttgggacaaaaaccttgtgtatcatgatgccttacaaccattgatcaattgtgttcttaacaccatttactgttctcaaagagcatgtacaaactcatgaaatatttaaacccaaagaacaaaacagcctgcatcaggctggagccaagtgaatgcattaaaaccacctgttattctccatcctgcacatggtgcaaaacaagggagcaaagctgagagaaaatggactccttccaaatcaggcaaatccagttttgaacatactaagtaactatatttgttcctttgttacaaaagcctttaatcaagacaattttgtatatagaaaatgattattttatgcatataagaaccctaagctatttttcttaatttcttctgatggaaatactgataaaaattattataattttatagctaaaaagccgctaattacaaaaaaacgtgtgctttctaattaaaattttaaaaacatagtagttattaagtctgtgattatttttctagacccaaagttgcgtgtgttataaatacttcataacaaaggcagataattttttwaaaaaaaagttatttaagggccttgcacagtggctcacacctgtaatcccagcactttgggaggccaaggcggttggatcacctgaggtaggagttcaagaccagcctggccaacatggcaaaacctcatctctactaaaaatacaaaaattagctgcgcatggtggcgggtgcctgtaatcacwgctacttgggaggctgaggcaggagaattggttgaactcgggaggtggaggttgcagtgagccragattgcaccactgcactccagcctgggcaacagagcaagactccaccttaaataaataaataaataaataaataaataaataagaatggaaaaaattatagtatactgattttttctttatgtggtagaagctatgatttagcattcgctgagctcggaagtttttgtaattaagattagaaattttaacttgaaattagagtttactggtagaacaaattcaggtgaataataggaatagtgatcttaccaaactcagaatcttaactaagaatatcagtgattgtttttatagcttgtgagcrtttatttaaagaaaggaataatgaactatgatgagtttttaataaaactgcatattttaaaccagtcttattataacttcatagtattcataaaataaccagatgtataccttacattaaaacaggttctaaacaaagcttaagcagaaaatcttttgcttactactaagtgtttaaataagtaattttgacacttacacaaatgtgtgtaatgcataacaaagatgaattctaacagcttgtaagtacagaactgttatggaatccaggtcttttagattccacaatctaaacttttaatttctgtgtgataatgcgctgtaacttgaaaaaagggcctgtttttggtcactatctttagtgaagatagtctaggagaagggacattagttaaaggtggtgatggacaatctagttgtattaatgcaagcctcaggcttttgtaatgtgttttgtcctatttagagcttacattctggtggaatgactcactttttcagcactcaactgattttcatatattcagcagagaaaatttgacccagcaatcccaatactggacatctacccaaaggaaaataaatcatcgtatcaaaaagatacctgcactcatatatttattgcagctctattcacaatagcaaagatgtggaattaacctcagtgtccatcagtgggtgattggataaagaaaatttggtatatgtatacaatggaatactattcasccataaaaaagaatgaagtcttttgcagcagtaaggataaaactggaggccattatcttaagtaaaataactcagaaacagagtcaaaataccacatattctcacttataagtaggagctatgtaatgtatggaataataaacattggagactttggaaggatgagaaggtgggaatggaatgagggataagaaattacccaatagatacagtgtaccttaggtgatccttacactaaaagcccagacttcaccactaagcaatatatccatgtaacaaaactgcacctgtaccccttaaattcatacaaattttaaaaatatagcgaaatatgataaaaagatgggagtaaagaacatcagcctcctcaagttttttcttttggtttgaagtagagcaaaactttcttacgttttttcctttttagagagaaacagctacttactctttccctccagaaacctgagatctttgaggagtagaaatggaaaaaatgcttatggtaatgtcctcgagtggagccaagacggaaagtgataccactatttagtttcctccctgttgaggccttttataggttaaagagaagagataagacagagatattcagaggtcagagagatatcacctggcaaaattatgggttgccagttaggatctttagaataaagagtaatagaaaaatcacagtarcaattggtcaggtgcactagatgggaagaaaagccctgttgctaggtcagagctgggagggacctcagaggttatctatctgcatgagaaaattaaagcatcatgacaagcccaaggttacctagcatgttaaatcacagactcaggagtacaatgcaagcatcagactcttaaggtcagtgctgtctccagtagaacattctgaagatgtggttaatattgctgtctctgttttgataggcctacacattctcatgaacacctgccatgaacacactcagctcatcccatctcctctatgaaaagttttctgactcactgccggtggaatcacctattcctattgcctcctttatgtcacctctgcagctgctgcagtctatagacatctaccatagcactcctatcgctttgttacatgtttccattcacttgtctctatctgttagactgagttatttgagggcaggaaccatatttcacccaactttgtatctccagtgcttatcattataccaagtacatgataggtactaagtattaatgtatttaattgatgttttaatttattcagtatttaagttggaaattatttttaaaatttgcaaaaatttcctgagatgggaggataaattcaagccatatttcacaggaaagggcagctgttgttaggggctgcccatacttaggcaaagatacagtttaaacacaactcaatttttggagttcataggtgacttgggtctaaagatttttctggagacctgctttgatcaaggcatggtgtcagaaggtacaagggtaaaaaaaaggttaatatacaacctgtgctctcatgaacatgaggatataggaaatgccttgagaatagccttaagaaagtgagtgccmatagcagagcaacataatgatcmatactgggcaagggaatattttttttaaatgaaaagtgagtatacacaagattgggagaaagtttagttgagattttttttttttttttgagaccaagtctcactctgttgcccaggctgaagtgcagcgatgtgaactcggctcactgtaacctctgcctccctgcttcaagcgattctcatgcctcagcctccagagtagctgggactacaggcgtgagccatgatgcccagctagtttttgtatttttagtagagatggggttttatcatgttggctatactgatcatgaactcctgacttcgagtgatccacctgcctcagcctcccaaagtgctgagattataggggtgagccaccacgcatggccaaaataatattttgagtgaaggccacacttgtttgagaacaaaagctaaggtaattcctatacacaaggcagtgcatcttagattggttcaagaaaaagatgtttgagttaggaaagccttttagtggatatatagaaaaagacaagtttgtttgcttaagttatgtattactggagaaattagcaaacattcagtatttgatcagacaaattttgtgacccttatagatttgtatccagaactaataataatagctatcattattgaagatctgctttgtgccagacagttaacatgtgtaatattatttattcctaccaagaattttatgaagtagaaactgagaagaaaactgtttgggattttagctaaaatttctttaatcacttaagatgtgtgataattcatataaattacctaatgtaatcattgcaataaccatacgaggaagaactatttttagtactattcttcacataaagaaattgaggtttwaagagattaaggaacttacccaaactcgcactcatcaaaaatgttggaaagaagattcaaatctgtcttttcttactctggaagccatgtttttgcctaccgagtatcacactgtatgtaaggtcaagtgtaaagagcagtaatgcatcatgacatatttactataagagatactccaaaagaagggaaggatgaatattggcaaggtactaaaaaagaggaatgcaaatgagtgtgtgtgtgtgtgtgtgtgtgtgtgtgtgtgtgtgtgtatgtgtgtgtgtgtgttgatttgctktggcatttgatggtggtgtgaccctgtaattcagggcttctgagaggagccaagctcagagatgaggataaataaacaaggaatggcaaaaggcatgggcccagtaggcatggcatccccattagcaaccaaggtcttctttgagtgcatcaggtttaacccatccaaaaacttcatttgttgattcaytgatttatctacttactcactcacatagtcatcattgctagccactgtaatatatgctgcatctgtggatgaagcaaagtggcattgccccaccttactctggaagtgacaagagaccacaagaactggaggtcccaatttgcatgatgatcacattcctcccaaagtccarttgtagtgctagatgctaaaacaataataatcagaggtataccttgttaactatatcataattacttataataaggagaaggattagaacatcgtctgtcatattctctactactgacttaatctatgtaaacgacaaagagtaaatagatctgcacataccttgcatgtggcaatagtggcgctgcagctttagtctacctctatattttaaatattagatatcactcttgtatgaggccttaatatatttgtgtttcggtgcctctttaaaggttgtgtgtttctctagaatatggctgtatcttaaaatattttctcagtatctgtcactgttcttgacactttatgcatgcttaataattgctctttgggtagaattgtgtttagtctaaaaaagtgaatgctttgatatccttgtttcagcacttttataatatgtgacacagagatatataaaaatttattcatcttgggccaggcgtggtggctcacgcctgtaatcccagcactttgggaggccaaggtgggtggatctcctgaggtcaggagtttgagaccagccttgtcaacatggtgaarcctagtccttactaaatatacaaaattagcttggcatggtggtgcatgcctgtaatctcagctacttgggaggctgaggcagaagaatcacttaaacctggtatgcagaggttgcagtgagccaagatcrcaccactgtaccccagcctggttgacaagactgaaactccgtctcgaaaaaaaaaaaattattcattttggagtttagtatatccttagccttaatgaagctacaaaggtggcaaagaacaagcaaaacatttcagagaaattattatttaagattccaatgaaacaacattaaaatatggatagttcacatttgttatgtatggagaacctcttttcaggagataaaaatatatctcaaaatcaaattatatcatcatccaggcaggtgattactatatcattgaagtagaaaaaaggccataaaattaactaaaagctgttggagaaaaacaaatatttaatgcattcaacattcattaaattagagctttaaattaaataccaagtttaaatttgagttggctgtgggtcactctctttgcttaactgccatatgattctaggaaggctacatgctcagaacagcacaggacaatgtgtgacatcastttgattttctggccaccagagaaatctaccagctgtcaccacagaaccataaagttcagaaaaatcaagtatcttaaacatgcacacacatttttcaracactgaaaagtttaatctatttgactgactctccaagtctatgaaaatgtcaatcctctgatttttctagttctcaaagtagagaggaggctgtgacagttagggcyagaactggaataacagaaaccccaactgtgaagctctccgggccccaaactatcagtagcataaaatatgaccaaggtacttaaatattaccgtaagtgttactgtacaagaaaaaaaatgtattcggccgaactcttttgaggaaaaggaattgaaaatcatatgtcgataacctgattgggaatattatatgagacaccaaggcaagttcaaacaacaatggattgtttgcaaaccacccaaaagatgatgggagccatttataacagttttggttttgctgagtgaggatacacaagattatggttaggggtgaattactgtagatacctctcagtgtttcatcactcagtaagcaaccactgtagagagtttatttagaaataaagtcgaaataagtatttaaatccttatttaatactgtactggtatattcgtttgaaaaggcaccaaattttcacaaattaagatcgaggtattgtttttttctttctttctttctttcttttctttttttttttttttttttttgaagcagagtcttactctgtcaccaggctggagcacagtggcactatctaggctcactgcaacctctgcctcccaggttcaggccattcccctgcctcagcctcctgagtagctgggactacaggtgcacgccaccctgcccagataattttttgtattttagtagagacagggtttcaccatgttggccaggatgttatcgatctcctgacctcttgatccgcctgctyctgcctcccaaagtactggaattacaggcatgagccactgcgcccagccctgggggggtattcttagttcttttgttctgtctcattctttccctcaagatatttgccatttcttgtcttaggagtcctttggcagaacatagaccacactctccctgtaatgagagaatagagattagggcctttccaatgtcttttctgaactctctcactggctcctgtgattccgtgctctaaatgctcctcatgtaaaaggttgaaatgatgcctcacctatgctaaaaatccttcatgcttctacgagttcacgaaagcttgttgtagacatgggatgctttgttgttgttgttgttgtttgtttagttttgtttttgagacgggatctcactctttcacccaggctggagtgtagtggtgcgatctcggctcactgtaacctccatctcccctgttcaagcaattcttctgcytcagcctctgaagtagctgggactacaggcacgtgtcactatgcccagctaatttttgtatttttagtagagacggggtttcaccatattggccaggctggtctcgaactcctgattttgtgatctgcctgcatcagcctcccaaagtgctgagattacaggtgtgaaccacccagccgggatgctttgttttaaaagcaaagttacattgcaaccttgatggcatcatctctcctgatgaaaagaacctggatactgttgaattagacaaatgatattattttcttgagttgaaaatgaaagacccatgaggtaaatataagcctgcaatagtttatgtagctgactaaggaactttggaataccaattaggatatgcatatataatacttctaaaaatctaagagtcagcatttaggatcctagaaatgttaagcgtaggttttgataggccacaactatgcagtgtatgccactaaaatattcttgtcttttaagcacttcctaaaagaatttctttgagcctttagacatttattattagaggcgtgtttttctctcttggaagttgtttttttctccccagtttgcagcactttaataatgtgaagtgattcagtttggagaagcactgaagcaaagaaragcctcatggagccrtactgagggaatgaaaatgtatctcgttaattcagccttcccctattgtcctcttcctatccatcaaagaaaattattttaaaaatcattcatatggaaacatacaaggrgtttgaagtgtgtttgtgtgtgtgtgtgtctgtgtgttttacttttgcatatacaaaacaaaaccctctagaaagctgctaaagctttctgacatcatcaagtccttttctgtgagtcattaagttgctgaagcctagaaaatcaaatttagtttagggctgtttgataatgtagtaaaacagtaaattgtgattcaccaattagctcacgtaattagaaaatcaaaaacatgctgtgagtgggtggtggacacacctaagtaaagtccattgtcattgtcattctatatgttcrctgattataactataattacacctttaggtgatgatactacattcaattttttgttacaaaagagaatccacaaatatctatgtttataaattacacaagtaaattaattacttagttcagtcactcattcattcactatcttttccctcattattttcttgccaggctctgtgttaggcaacagggctggctgtctgggccttgcctgcatagaactctcaatccctggtactgggtataaattcttctaagatagaaaagtaaatgtmagttagaatcctataaaaagtatggctttatagttaaaatgtagtccttctggctgattcctaaattccaatgatgttgccaagacacgtatsaraaataagaaacaaccgatttgagaattttcttgcttagaggttttgcctggttgagaagaattctgagatagatgaaaatgagaaaggaatatttgttagattattttaaaccaacttttcatatggcctctgtgcacatttgtggaaatctaaggtgcctggctgtatttaaaatgtatttctctctgtaaattcaaatcaatacaaggattggttggatggttgaaacaattmgtcactaagcatttcaaaatgtgtcttactttgctcatttcttactgctactgaggtacataggtatggttatatggtccagggctttccaataaagataataaaaggatgatggggatgatktacctgagcttgagccactaaagaaaaggtatttctcagatgatgcagtcattttcatgctatttttctattcaaaaatggaacaatgttgttctgccattatcactgatttttaaggtcatattttagtgttcaaacataacattttttaaaaaacaagaaaattattttcctcataattgtatcattgcccctagatgatttgttctttgtaagctcacaatatgtattttgtgttattatacctcactacaaaaaaatcacagaattactaagggaagcaataatctttgagtattttttgtagcatctcagtcatatattttagaatagcatagattatgtttcacttgaatgaaaatgcacaatcagaaatatcaagaaaatgtggttatttatagctagaatgaaaatttcacccccaagcattatttaaaatgcagctgtctcctcctcaacatgtatttaatagttctcttcttattttttccctatttacaggtcaatgggacagaaattgaatatgaatttgaagaaattacactggagagggtaagaaaaaattttgaaaaatccaaagccccaatcttgcatttcacattctattctaatcttaatgagttgtcttgtgaaattatacaattgtgttttataacctggaagtttcccacaggactcacaatgagaatattaatgaaatgctcacagtagaaagcattgagacagcagaccaaataactgaaygtttagtatgtaaatttcattgccaggatttggagaaatgaatggaaaagagaaatgtttgatgagcttgtacagcactttgttcttaatggttttattattagtgttttggctatacattatttagatatgttacaagatgttttcatttgtgtgatatygatactatcatcataattatagttaccatgtgtttcttacttagtttaaaaaacaagtggtgcattttaaaactactcccataggaaaaaacacagcaaccccatagagctctgcaaatatgctggtagggtcctggcaaagtgctttgacaaattaaggaaactgtgcaacacaaccctaatatatgtagatattttacagaacaataagagaaaggccaaagaccgtgtagaaaaaagtgaccaaaaagcattaacaggacattcattaaaaaagaaaaagccaataaacaaatgaaaacctgttcaacctcattaagaacaaaggaagacaatgagagcaaacaagttttgcctgtccaattgacagaaacttaaaaggaatgtgaatattcaatgccagtgagaggttctgaaaattagtacaaccctacaagagcaatttggaaacatagattaaaagcctttaaaatgaatacactctttgacccagaaattgtacttacagtagcggacaaatacacgatgaatgtgtgtattgatatggtttataatagtgaagattgaaaaacataggtgtttaataataaacaaaaaaggataatgtgtttattatgtattcatgtaatataaattatattaaaatatactgaaataatactttagaaaaatatgtaattgcaaggatagaaggtctacctagattatattattaaattaaaaattaagttttaaaatggtatttaaaatataattcagtagacacaaagctatataatataatatatatacataaatacactcataaagcctggaaagatgtacaccaaatgttacacatgttggtggctaactcctgttaaggattttggggtaatgtttagtttatccttcttgcttatatttatttcataaaccttctatgataaacgcataccacatttagtataagaaataaaaatgtaaatattttcactaagctatcattcaagtataaatgaagattgtagacctgcactttaatttatatctcgtttttagtttactaattattcactttcctgagtcagagcatttctcatcttcaggctgatttttatcaagtgtgagtgcttttaaaccaaaatatacgttgaaacttaagtgtttgacagatgggttctttaaaacttccattatggacttgataaaattttaatggtatgctaactggagaaaagtgaggcttatggaaaatgagctcaaatgagacaaaaaaacacatttctcctgaatcattaagtttctctccaagacaagctatatgatttatggagtgcagtacaacatgaaaacgtggggcctttctaaacacaggactcaatgcaactgaacaggtctcatgcccgtgaagctgagccttctcctttttccttatccaatgtacatcaccatcttgaatagaacactatttagttgccctggtattggaggtcaaaaaataaaagctaacattggtatgagagagaacactcaataggagtcagacaactgtgggttctagtctggattctgatcttacttgtttcctgatcttcagcatgtcagtttaccttgctaacttcctgccttggggttcatgaccatactctgaactttgttactgccattaactgccccctctccaaagcctctatgtcaagcaatatctttgtgaacacttcctcccttctgttcatatcatttattctagtaccttctcattgaaacttctttagccccattggaacctcagatcattgatttcaccatttctacccagctttcacctttctttatgccctctcttccctccccacctagcatgtattacctggtccctcactctaattctccctctcatgcacttttttttctcttctctagctttttgtgctcatccagcaaaaccccagtccaagttagcttacgctggttaagccaacactttcctcttcactccatgccactgcctcagcaactggatatggctagagaaacactcactcatctcactttaaatatttaaccattgattttaagtgaactctcaagactttctagcaattcttatacacttctttagaaaaaatcactttctcatactctgggacaacaatttcataccttatcatatctcctcaaatctcaagcactctcttctctcatcttctctttcagctgttgacctgccttaatatgtttttgagaaaatccaagcaatcaaatgaaaaccacattttcctactaccaggtctactagtatattctcccatggcaatgaaggaaagttcctattccattctaagaccaactttttacttgttacctagactccattaccagttatccattgaatgattttccttctgcagttatctcctctctcttctgcaatatcaagccctatcttgctttttactgaataactttaactcaggcacagtatatctttcatcttagaaaaaataagtaaccgtcccctgaccctatgttttccttccactattacctcattattctattttgctttaccaaaaatctaagaaaattgtctattttcattagctcccccttattacctcattttttwwattttaacctgtttcatgttctcatccccacaatagtcataaatccatttatatcaaagtcattactggttccatcttgctaaattgaagcatcagttctcagacctaactgacttcttagcaggatttgatgcttcctccttcctcaaagatgtcaacattttaacttccaggacaaaacactctcctgttcttttaccacctcaatggctgccctttctcagcctccttgctggctcctcctctaaaggtttcagcactccagatacccagtgtacagacctcttctccatcttttcttcattccctagatggcctcatccagactcatgcccttagataccaactgtcaactgatgactcccaattctgaagccatgacatctccctgaatgagaacttcaaatgtatatgtctaactgtgcagttggcatctctgctgcttgattattaagaaagccccttccctgcagtccctcttctcagggccaaagtaactgctgccctaatattcttcatattgactaattggttctatcatttcccatattatttatgccagaaaaataatctaaaatctaaaagtcttgctcaattattctttatcctcagcattcatgagtaagtcctgcttgtgctaccatgaaaatatattacaaaatcagtcagatcttaccacctgctctgctgaatcctaatccaaaccaatttcatcccatgcctcaacaaccataatagcttccacttttaccctgctgttctcctccaagtaacccgttatcttttttcaaaatgttaatataagccagatcataccacttatattcttaagaccttccaaaggtgataattaacttcattatcattacatacaaggccttctgtaatgtgacacctgctcctctctccaacattatgtgctcaccaccaactcttcataaatttcactctagccacggtgaccttgacgtttctcaaacaagccaagcttttcctaactcaagccctatatgtatgttattctagctgcctggaaaaattgtccgttatatctttacatggtttattctttttattatttaaatatctgctcaaatatcatcaccttagaaaaatcttccctgttcactgtaattaaattagtascatttccatcattcttttttcccattttattattacttaattgcactcaccagtatctgaaatgtatattatttatttatagtttattttgttaacatctattccttcctgtaaatatatgcagtatataaatataaagtgatttatatacaatttttctagaacaacatctgaaatttagtgtatactcagggagtggttggcatctaaatgaagttggcctggttgtattactggaaggacagtaacatagacgcacatggcctggtttgaatccaggtttgaattctggctctagcactttctggtcaagtgaccttgaactacatacttaacctctctgtacctcagttgccacatctgaaaatgaggctaaactgtttataattaccccataaggccgttgtgatgaatacatgagttaacgtaaaggtttagagcagcatatrtaattattcttaatattttctttggttaacatggtagttctcacaagaattatttataaatataattgaggaagttattaaagacatagcattccactctcaacaaacaacttaatctaacaagaacttcttttgtttctgcttttcttttctttattagatgtcaaatacccaatgacaaataagttatggtatttgccacgtgcatttacagcttatacttttgctatgtttaacctctgtaacgtttaatttaagtaataatcacatttagtaacacwcctatgaggtagatgttgctaactccattttacatattaggatactgaggctcaaagattaaatcacttgccaaaaatcatagctttataagagatagagttaggattcagccctatgtccaacagatattagaatctgagcttattaccactgaattagactgctgtcaaaattaagcttaaatatcatttcctccaaamagatttycttgactttcactcttgggcaatatgcctctttgaaaacaacaacaataggccaggggcggtggctcatgcctgtaatcccagccctttgggaggccaagctgggcggatcacgaggtcaggagatcgagaccatcctggctaacacggtgaaaccccatctctactaaaaatacaaaaatttagctggrcgtcgtggcaggcacctgtagtcccagctactcaggaggctgaggcaggagaatggcatgaacctgggaggcagagcttgcagtgagccaagatggtgccactgcactccagcctgggcaacagagtgagactccatctcaaaaaaaaaaccaaaaaaacaaaacacaaatagagaatttatcacactagatgataaataaaatctatttcttccactggcctatgaattctatgatgaaaggaattttctcataatgttctttatgttatcatggtgacattaaaagaaaagaaaaagcccttgggcaatwtgtaaacaagttgacgactcctcctctacagtagcattgtttaaagcattaaccacttgccacacagagtgaacttcatgaatatcttttgtacatttaattgtcaagcacttgttaaacataggtacagggcacagaccttgtttcaaagaattttgcagccttgtggaggacacagaagtaaatgcacaaaaactatgacgataagtagattgctctcaatatgtggtccgcatgaagtaatttcctgaggcatcataactgagctggcttatgagaggtgagagggaacaagccatgtaaaagagagtgaaagccagacatagcagctcatgcttgaggtcccagctactcaggaggctgaggcagcaggatcatttgaacccagtagtctgaagctgcagagaactatgattgtgccactgcattccagtctgggcaatagaatgagaccccatctttaaaaaataaaatttttttaaaaagtagtggatgacggcctctcagatagggagtagcaggtgcaaatgttaatgggcccatggaaaagtaacatgctaaataaaaattcacaagtattatacaaatatattcatttatgtataaatacacacatgcttgggtggtacctttgtatttaatatttacatttgcatatatttcaaatatgcaaaatatacagtgatgattgcacatacataaactttggagttcagttaagaaatgtatctattaccaaaattatttaattaaactataagattttaatacagttgactatataaaaactgaaattctatcaaatatctactcaaaccgtgcctgtttttttattcctgtcactattattaaaaatagctaaagagacctagaaaaaatgaggaatttagaaattcaaaagctttatattatttgaagtaacagatccttaattctattwgaaattaggaattttcaaaaagatcaacaatgtgagataaaagaatttggtctaaataaatcagatatctaatgattttctagttattttgatatctggagagctggggaggccactattagacaactttaatgggtctcttcttacctggcaattcactaatactgtttttaaaattcccatgttacataccttatatcctaaacttgtttcttctgtaggaatttgcatgatgcaataaatcagtcatttttcttttctctataagtcattttgttttggcagaggtgaaataatgactaacaaaagtcagtaatttacatttcaggaaatggttcagatttttaaattattttattagttgcaaaaagaatccctaacttgtcagacaaaacgttcaaatagtatcacatggccatacattctgcagctgttgggagagcactccaaatgtttttttcttcagtgaggatgggaggaatatgagagtcaaataaggtagctgatagtcattttagcatctttgcaaaactgtaatcatgcgtgctggtcagggttataaaagcatcataaatctattatccatgctcggtcaactaactactcttgatacaaatcatgttggggktatataagctattaatttcatacatggaaaatgtataaattactcagagtacgcaaagacatggacttgacttagctgcatttgctaatgtcataagaatccagggagtcaggaaagcttgagatatcaaagttgtctatggctgagcggctcagattgtgatagtaaaaggaatttgtggaattatactctaggcatctttgaattttcccttctcttttgtattttcctgtcctgcaaaacaccacatatattcttctatcgttcctagtatatttttgaattatttcctcctccatcaacttggcagaatttagccattaattatttgtcttaaatggcataccttcatcctttcccaaatactatgtatgtgcaatattgcagccaaagtgatgtatttaaaacataaaaatgattatgtcatttttatcctaaaatttctccagaggctctttattgtctttaggataaggtttaaactccttggtatattatttaaggcatccatggatgtcctcttcatcttgccagcctcatttctcccttggagccctagttcatatcttgaagtgcagtcattctgaactacttgcagttacagaaatacatttatataatatgtgtgaattttaatcagtggtttattggttttggttaaaggtgttggaataatttgagaagaaaaataagcttataaaaacagtgggggctggtacttgactaccagtggccccatacccaagacatctgcccactaatctgcacctggcattgggtgtgtatttccaggggcagaccctttagatcaccaggctttggaatttgcagccagcactggtagggtcagcctgaagtaacayaggggactagacggctgactagatatagctgggagcacctcttgcactgaaggaaaccaaaatatcgagtaaatcatcacacttcgaatagatcttttgaaataaaacgttgaaagtttatagagaggtgacatagaaaccaaagtagaagaggggggaaactgggaaccctgcacagagttgacaagctccagggccagttcctggccctaaataggacctaaagaagggcatacattgctggtgaaacccagtgcagaaatctagtcacaaatgaagagcctcaaccctctaaaagcatccagaaatgaagccaatcaactatactcaatatataccacaattcaactctaaaagaaataaagaatataaaaataggtccactttttgatggggttgtttgtttttttcttgtaaatttgtatgagttctttgtagattctggatattagccctttgtcagatgagtaggttgcaaaaattttctcccattctgtaggttgcctgttcactctgatggtagtttcttttgctgtgcagaagctctttagtttaattagataccatttgtcaattttggcttttagactggattaagaaaatgtggcacatatacaccatggaatactatgcagccatcaaaaaggatgagttcatgtcctttgtaggggcatgggtgaagctggaaaccatcattctcagtaaactatcgcagggacaaaaaaccaaacactgcatgttctcagtcataggtgggaattgaacaatgagaaaacatggacacaggaaggggaacatcacacaccagggcctgtcgtggggtgggggaaggggggagggatagcattaggagatatacctaatgtaaatgacgagttactggttgcagcacaccaacacagcacatgtatacatatgtaacaaacctgcacattatgcacatgtaccctagaacttaaagtattaaaagtatctatctgtatgtaaatgtgcatttgcatctgtttgaaagaacaaggggaaaatgtggaaagtctacagcaggtgtkagtattggcagctcaaggggatggggttgaagatgaggctaaaggagatgatttgctttcactttatgtatctttatatgatttcaattgttagaataagcatgtattacttttgtatttaaaaatattaatggctgggtgcagtggctcacgcctgtaatcccagcactttgggaggctgaggtgggtggatcacttgaggtcagtattttgagaccagcctggcmaacatggtgaaaccccatctgtattaaaaatacaaaaattagctgggcatgttggcgtgtgcctgtagtcccagctacttgggaggcggagacatgagaatcgcttaaacccaggaggcagaggctgcagtgagctgacatcacaccactgcactccagcctgggtgacagagcaagactctgtctcaaaaaaataaaaataaacttcaaaagcctgtccaagtgatagcaatgtaagataaaggaatgcagccgtctcaggtgagaaagaatcagtgcataaactctggcaattcaaaaattcagagtgtctccttacctccaaataattgcaacagcttcccaacaatagttcctaatgagaytgtaatggctgaaatgacagacacagaattcaaagcctggatgacaaggaaacacaacaagattcaggagaaatccaaggaagccagtaaaactatccatgagttgaaagatgacagagccattttaagagagaaccaaactaaagttctggaactgaaaaattcactacaggaatttcatagtatagttgcaagcgttagcaatgtaatagaccaagctgaggaaagaatctcaagctgaaagactggtcttttgaatcaacacagtcagacaaaaataaagaaaaaatatttttttttaatgagcaaaacctccaagaaatatgggattatgtaaggagaactaaactacaacccatgctggtattcccaagagagaaggagaaagagtaaacaacttggaaaatgtatttgaggatataattcatgaacatgtccccagtttcactagagaggttgacaggcaaattcaagaaatacagaaaamcgctgcaagatactatacaagatgaccaaccccaagaaacaaagtcatcagattctccaagattaacatgaaagaaaaaatcttacaggcacctaggaaaaagggtcaggtcacttacaaaggaaatttcatcaagctaacagcagacttctcagcagaaaccttacaagccagaagagattgagggtctgttttcagtatcctcaaagaaaagacattccaaccaagaatttcatatccagccaaactaagtttcatacacaaaggagaaataaaatcctttccagacaagcgtaagggaatttgttaccaccagatcagccatacaagaggtccttgagggagttctaaacagaaatcaaagaatgatacctgttaccacagcaacacacttaagtgcatagcacagaccctatagggcaactatataatcaagtctacaaaacagctaacaacaggatgacagtatcaaaacttcatatatctatagtaaccttgaatataaatggcctaaatgccccacttaaaatgcacaaagtggcaagctagataaaaaaacaagacccaagtgtcttcaagagacctgtcttacatataatgacaaccacagtctcaaagtaaaagaatggagaaagacctatcatgcaaatagaaaacaaaaaagaggccgggcgcggtggctyacgcctgtaatcccagcactttggggggccgagacaggcagatcacgaggtcaggagatcgagaccatcctggctaacatggagaaaccccatctctactaaaaatacaaaaaattagccgggcatggtggtgggcgcctgtagtcccagctactcgggaggctgaggcaggagaatggcrtgaacccaggaggtggagcttgcagtgagccgagattgcgccactgcactccagcctgggcaacagtgcaagactccgtctgaaaaaaaaaaaaagagaaaacaaaaaagagcagaggacagtattcttatttcagaaaaaacaaacaaacaaacaaacagattttaaaataacaagtcaaaagtgacaaagaagggcattatatgataatgaagagttcaattcaaagaggacttaactatcctaaatatatacataccaaacattggagcacccagtttgtaaaacaggtacttctagatctatgaaaatacttagccacataataatagtgggagacttcaacattctactgacagtattagatagatcatcaatgcagcaaactaagaaaggaatcatgaacttaaactagacacttgaccaattggacctaataaacatctacakaatattctatccaacattgatagaaagtacattcytcttgtctgtatatggaacacactcyaagatctactacatgctttactggtaaagcaagactcaataaatgcaaagaaataaaaatcataccaaacatactctcaaactacagtgcaataaaaatagaaatcaaaaccaagaagatctctcaaaaccacacaattacataggaattaaacaacttattcctgaatgacttttgggtgaataataacattaaggcagaaataaaaaattctttgaaattaatgaaaacagagctgtgacatactaaaatctctaggattcagtgaaagcagtgttaacagaaaagtttatagcattaaatgcctacatcaagaagttagaaagatctcacattaacaatctaacattacgcctagaggatctagaaaaacaagaacaaactaacctcaaagctagcagaagaaaagaactgaaatcagagcagaagtgaataaaatcaagatgcaaaaatatatacaaaagatcagcaaaaccagtagttgtttctttaaaaagataaacaagatttatagaccactagccagaataagagaaataaagagaagactcaaataagcacaatcaggaatgacaaagataacatcacaactgatcccacagaaatacaaaagatcctcagagactgttgtgatcacctctatacacacaagctagaaaatctagagaaaatggagaaatttctggaaacatacaacctcctaagattgaaccaagaagaatttgaaaccctaggtagcccaataataagttctgaaactgaatcagaaaaaaaaaaaagccaatcttactgaaaccagtttcactgaaactgttccaaaaaaatctagggttagggacccctccctaacccattctacaaagccaacgtcatcctgatacccaaatttggcagatacacagcaaaaaagacaacttcaagccaatatccctgatgtgaacatagatacaaaaattctcaacaaaatactagcaaactgaatccagcagcacatccaaaaggtaattcactacaaggaagtaggctttatttctgggatgtgaggttggctccatatatgcaaatcaataaatgtaattaattgcataaacagaactaaaaacaaaattcatatgatgatctcaatagattyagaaaaagctttggataaaattcaacatccttcatcataaaaaatctcaaccaactagacatcaaagaaacatacctcaaaataataagagccatctatgaaattcctgtagtcaacatatgacatggacaaagctggaagcattcccattgagaactggaataagacaaggatgcccactctcaccactcttacaacatggtacttgaagtcctagccaaaagaatcaagcaagagaaaggaataaaaggcatccaaataggacaagaagtcaaactgtctctctttactgagagaatagaaaactatgtatactgtatattctatgagagtataaaatactatgtttctctatctagcaaaaccctaaatactccaccaaaaagctcctagaactgatgaagcacttcagtaaagtttcagtatataaaatcagcatacaaaagtcagtagcacttatatacaacaataatgttcaagctgagagccaaataacaatgcaatcctatttacagcaggatacagtagtagccacaaaaagatttaaaaacctaggaatccatctaaccaaaaaggagaaagatctctaccaggagaactgaaacactgctgaaagaaatcagagatgacacaaacaaatggaaaaccattccatcctcatggattggaagaatcaataccgttgaaatggccatactgaccagagtggtttacaaattcaataccattattatcacattaccaacattgtttttcacagaataagaaaatactaatctaaaatccatatgtggctgggtgcagtggctcacacctgtaaccccagcagtttgggaggctaaggtgggtggatcacgaggttaggagtttgagaccagcctgaccaatatagtgaaaccccatctctactaaacatacaaaaattagccaggcattgtggcgtgtgcctgtaatcccagctactcaggagggtgaagcagaagaatcacttgaacccgggaggtggaggctgcagtgagccgagatcatgtcattgcatcacgagatgcaatgtcattgcattgggtgacagagtgagactccatcttaaataaataaatgaatgaataaataaataaataaataaaattcttatgtaaccaaaaaagaggctgagtagcctaaggaatcctaagcaaaagaacacaactggaggcatcacattacctgatttcaactacattacaaggctacagaaaccaaatagcatggtactggcacaaaaacagacacatagaccaatgaaacagcatagagaacccagaagtaaagccacacacctaaagccatctgatcattgacaaagtctacaaaaataagcagtagggaaagggttccctattcaattaatggtgctgggataactggctattcatatgtagaagaatgaaactggacccttaccttttatcatatacaaaatttaactcaagatggattaagacttaaatataagacctcaaactataaaaatcctaaaagaaagcccaagaaatacccttctcaacattggcattggcaaagaatttatggcaaaatcctcaaaaggaatcgcaacaaaaacaaaaattgacaaacgggwcctaattaaagtaaggagcttctgcacaccagagaaactatcaagggaataaacaaccaacttacagaatggkagaaaaatctgcaaactatacatctacaaaggtctaatattcagaatctacaaggaatttaaacaaataaacaggccaaaagacaaataactcyactaaaatgtgggcaaagtatatgaacagatacttctcaagagaagtcatacaagtagccgaaaaacatatgaaagatttctcatcatcactaatcatcagagaaatgcaaatcaaaaccacagtgagataccacctcataccagttagaatggcttttgataataggtcaaaaaataatagatgttggtagggacgtggagaaaagggaatgcttttacattgtggatgggaatgtaaattacttcagccaccgtgaagagcagtttggagatttctcaaagagctaagagttgaactaccttttcacccagcaatcccattactaggtatctacccaaagaataataaatcatcctaccaaaaagacacatgctcctatatatttatcacagcactattcacaatagcaaagacatggaatcaacccaggtgcccattagtggtggaytgggtaaagaaaatatacatacatttacatggaatactacacagccataaaaaaaccatatcctttgtggcaacatggatgcaggtggaggccatcatcctgagcaaactaacgcagaaacagaaagccaaatactgtgtgttctcacttataagtgagaattaaacattggatacacatggacataaacatgggaacaatagataactggggaacatcagaggggagagggaaggagggaaggttgcaaggcctgaaacacatcctacttaggaccatgctcacttcctgggttacaggtttgattgtactccaaacctcagcgtcacacaatatgcctttataacaaacctgcacatgtcccctggaatctacagtaatagctggaaaaaattataatttgtaaaattccaaggaaaaatcagaaatatcaaatttagaagattttttttattataaaacaaaaagtaaataaaaataaaaatggtggaaagaagcacagtctttgaactcagaccttgttagagtctagaatcagccacttcctgaatgaccgttcattacttaacccgttaaagcctcagttttctctgtaatgaatggggtactactatctacttcatagcattgtggtaaaaaaaataaaaataaaaataacatatgaatgcctaaaagagttcctagaactagatactagattatcagtattattagctattataatgtttatacacaaacatttatctacccccacctttttaaagatgacattgtttgtataactttaggctatgattatttgactatatcaaaaggcaaatatatgcttctactttgtgtgcgtgtgtatatgtgtgcacatatgtgactatatttgtggttaatagtatgctttttaagtgatctctgaaatgtgtgtatgcccaattattaatatatatttaagtatgttaagtatataagtggaatctgtccttgatttacaaccataattttttctagaataacatagcactctgcaactcttttcttttctttattaactcatgagaacttagttccaggctagataagaaattacagtgttttattttcaatagtttgagactatgatattttgctctgatacctttttaaaatattttattttaatgactccccatttctaatctctgcatataaaatgctaaacagctagtgttttgtcgtgcattaaaagcacctcttctttttaaaaagcatcctcctccttttagggaactgcccttctcctctttccaaccccgtgattctgggaaagaatgcagtcatagtacccctggtcacacagttgatttgtctagagctgctcattggaataaccaggttagctagtaagaaataatactgataattagaccagatgaatctcaactaaacccaatggatccgaacctctggggctggagcatggaaaatctttagttttagaactatcttggtggtcacatgtgcagtttagaagctggcacctgagcgaaatcaagccaagcagattgtttctcaggattttctacagtggagtatgggagcagagagggggcagcattcccactgtgtagtaaagtgtgacatacaatacagaaaagtggccactatgtggtctttttgccatatgaagtaatgtcatctgaaataatgagccttcctgcagagaaagctagagactggagatgagagagagggaaagaaggagaaagagaaaactggcaacttccaattcccatgttataactgtcccaaggacccaatcagaaaccaccaccctctttcctatgtmtacatgagccttcccttaaattcctcttatatctaggtaccccaaatcaggaatgtataacttgccarcaagtggggctttatacaaatgtatcttgaagttgtactttagctatcactattctgaagttgtcaggtaggtcatgtcctagggtcatattgccacagcctgttctcaaaataaatgttgcattgcatagattcttcaygcaatgcaacatttctaaattatttttctaattatttttctaatttctttttctaaattctttctaaattcttttctaatttttacttttaatttctgttggtacatagtaggtgtatatatttatggggtacatgagatgttttgatacaggcatgcagtgtgtaatatcacatatcatgtaaaatgtagtatccatccctcaagcatttatcctttgtgttacaaacaatccaattatacttttttgttattttaaaatgtacaattaaattattatttagaccttttctaaattctaatcatgtctttcaccatggaggtaagatgataaagcaaagctctccagtagaacaacattggcaggttgccataaacyttaataccccaaagcttatacatatagtctcctttaactcattactgtgtcctaacttccaagaatgaaagagcaatttttcttaaagtggcaagtaaaaagaatgactagggacaggtctgcaaatttaggtctccactgcctagaaacctttctgatttggaaaccagctggcttttgtgtgtgcaaagtgcttttgcagtgttaactatytgagtcagatgtcagggaaaaaaatgtgtgtgttagaaatatagtttacagacattcggaggggcattaatctaacttttctttagatgtaagcatcaaagtgtcaggaatgagaagtgcctagtaaacatacctcaaagggctgagttagatgaatcggcacaaaatgcatttagctgaaattcagctgctgactccagccttctccatttttctctgtaagtgctcagctgagttatctcctttctctcgcctcacaaaccctctgccacctgattattaacaagtgctgtcttccagttcattagtccaagtcttactgccctcacatcatctaaactgaccaatatattttcttctgcgaatcacttgttacaatattaccccatctttgacatggccctgatttttaccagcacatctaatgctaggacagtcatgtaccacataacaacattttgatcaatgacaaactgcctatacaacagtggtcccataagattataataccctatttgtattgtaacttttctatgtttggatacacaaatattcactattgtgttgcaattgtctrtaatattcagtattaacatattgattgtactggtttgtatcctaagagcaatggtctataccatgtagcctaggctataccatctatgtttgcttaagtacattctgtggtgttcacataatgatgaaattgcctaacaatctatttctcagaacatatccctgtcattaagcaacacatgactgtataagggtacttttaaaactaacagcttttagacaaaatctgcaatggaaagacttgcatagaaatgacaaagctgtatccccaagttgaatgttctaatcaaagtagatttatttccataatttgtaaaaacaaggtgtgggtggctaaggagatttggcaagaaaatatctaactcaggggtacgagtttaggatctgatggagttaccagattctgagaatattggaaataacaaagatccagggaatacacaaagaggtctaacatctgaataatacctgggtcactagattacaggtcttgagaaatggtaaagctggaaattttgctatttgcaactgaacaaatcataacagctttggctctatatttctgtagcttaactctcaggctggcaaaaaatataacttcagtcattcctagtgctttcccaactacttcagtcatctgcagaattgtccagcagttctatgtccttacacagtgacaagacaacccacacattgtttggtttatcctcacaaataactgctgtgatagtcattacccctctctgagttgtttctttcaatagtggacctttgttggttatctcctcatgttattcttcctaccccttcctaattgtccctagattttggttcagataatccctgtgctttgctagaagctgacatgactctgaattgcaagggtgggtttttactgattkaggccaattgataccctggcctccattagtggtggatatgcaacctaatccagtaaaatcagagcaaattccatgattcttacttagaactttgaggcagaagcccacccttctctatgagcacgaagtaaggaaccctgtatctggaagagtagcttgaagctgttttgtgactgtaggggtttccatctttagaatgaaaccagcattttagatggcagaatagataaatgaaggtaagaaaacaggcttggtgacatctacagaccgtaaatcaaaccatctttgaaactttccttctgaatttttattacagaaagctatgaatacagtttattagccagtttgcattggtgcttttgtcatatgaaagtaaacaacaaaaccctattacatagcaggtcatgaaatttttaggaaactgcatagggccccaacttcttagacatgctttaaaatgtccatctctgacagatattttctcccctttcttagtcaacataatcattcctcaccctacccacccccaattttggaaacctcactcttgttctcttcttcatcaagactttgtgcttttgtagagaattcctgttctccattgtaccttatccccaaaccctttaattttctaacgtgtttattaggttttgaaaacaaaagcagggaaatctttacaggctgcttctgagttcaaccctgcttctccctgcttcctcctacaatgaatacctgcttcagtgggaagaaaggaaaaggaaaaacrcacagagaagtaataaaaacactagtagctcgaaatagagcctagttacacagagatgtacattaggaaaaactgaaattatttcaagcatttgagcaattgttagaattcagagtttacaagcttatattttatccatttaccttgatgttgatgagcctgatgcattttaaactctcaaattatctattgtttgaaggaaaagaatgtatgtattatgaaaataggcattaaaacctgtttggtgaattacgtggttttaaagtttaagatgtttggtctatatagacttagcttaaattaaaaatgcacatgtagtcatttagaaaaatgtcaccttggatttaactcaatattaccaatcagatttattgattctaaaattattcttcactctattaccatttttaactgatcaacttcttcttatcattcaaaacccagctaatatgttatctcccctgaaaagccttgtcaaatatccccagagttagcttgtcccttctcttcattacttcaaggctttcttctcatcatgtgttcacatgtgcctaccttttatatactgactaaaaaatgagcatcatattttattcgccttatattcccagcacctggcacaaggtagatgctcaacgttgaaactgaaattctacaaagacactgtatcagtcaggataggttaccgaaaaatctcaatgacctaccagattgcaagtttatatcttactcctattttagtcttccaaggacagagactcactgtattagagtctccagagaaaaagaatcagtaggacatatatatatatatgaggggatttagtatgagaattggcttatgtaattatggaagacaagaagtcacacaatctgccatctgcaatccagagaactaagaaagtcagtggtacaattaattcagtctgatgccaaacatctgagaagaggggaaaacaaggggcaggatccatataaaatctagagaccaaaggtctgaaaacctggagctctgatgttccaaggtaggaagagataatggatgtcccacctccagaagagagcaaatttgtccttcctctgcctttttgttctatctgggacctcaacagattggatgactctcacccgcattggtgagggagaacttctttactcagcctactgattcaaatgctaatctattccagagctgccgtcacagacacaccagaggcaatgttattatcagctatttgggtatcccttaagccagtcaaggtgacacataaaattaatcatcacactgaccaagacttcatcgtgatgtgttcacctttgtaatcacaacctggattttaaatttatctctggcaatgacacacaatgctttattcacattttactggcctgaaagccagtcaccttttcttttttttttttttttttgagatggattctcactctgtctccaggctagagtgcagtggagcgatctcggctcactgcaacctccgcctcctgggttcaaatgattctcctgtgttcaaacgattctcctgcctcagcctcccaagtagctgggaccacaggcatgtgccaccatgtgcagctaatttttgtatttttagtagagatgtggtttcaccgtgttggccaggatggtctcgatctcttgacctcatgatccacctgcctcggcctcccaaagtgctgggattacaggggtgagccatcatgcccggccagcaaatctcctttctacctggagctagaaagatggaaagtcagatatatttggggtacagcaaaaataaccaacaaaaaagttaaatatacaaattccaggttgaaaacaatggaatcagtactgttcttttcttagaatcactgaattatgattagaaaactaaagtttccagagattattatttcacattctattgattaaaaaaaacctgtagatattttaatatacaaacctatgaactaaaatatggctcaataaaaccaatgtaactaagcagatttatcactactcaatgatgagcctctagtagttaaataatttttttgaggagacacctgcagccactaatagaatgttaactaacttggctcctgttcactttgattttagctgaaccaaaggaaaatctggagtccaaaagtttaaggccctaaagggctaaatttttccttagtttattttttttcatttggcattttatcactagaataatcaatttagctttccagcaaaagacaaaggataaaaactagtttttcctcctgagagtgtgtgtttgtttatgcatatatgtaacagatatacaaatatgtatatacaagtataaacatatatgtacaaatatatgtatgcatatgtctatacattttcatttacatactttttaataagtatgttgtttcatatatatttatatacattctatattctatattatatatatgcatatatttctttcatgtaattgtatgcagttatgcatgtcactagatagtaaatggatggataggtaggtaggtagatagatagataggaaaataaataagaaaaaagaatattctttggaggttgggaccaatgctcagtgcatctgtttctagtgctggtagcagtggcagtgtaacagtaagtataactctctattgtttattgaagtttggaccttatattctaatcactctacaatggctcttttatatcttaacaataagcatgttacataagttttgagcctctgttttatagataagcaaactgtggttcaaagaagttaacacatttgtcccgggtcacataacaagtatatggcagagctggttaatctgtcttaaatcactaagatgtgaccagcaaacatggaaaatatggaagactttttggagtaatatattcattctctcactagtcatgatatagtcagattgccttcaagacttaagcccacctatcaaaaggaaaactaagccagataacaaaggtaaatattgaaagcctgaaagcagctgagagagaaagatgaaaacagtaggtagatagagatacatttatttttgtttgtgattattccttaatgtttgggaaataagccatacttctccctgctcatctgcctaacttattcaaagctccgtaacattgccctaactccagggaaaaacaataacaaaagtgacatcacatcctgcatgtttagcatttttggaactcgtgaataggaatacagttaaatcagtgttccaattgtgttgtagacatttttctcataaaaacgtatctatattttctgaaacttaaaatcaatgagatgcttagttgtatgcatgcagcattattgttttacttgtttgacataatgtatatattatgatacatctcatatttcatattacgtcactattttcaaattatttcttagatattcattttattctccaaagtgccctgtgaaataggaaaaggaaacatgatgctcctcattttgcaaataagaaaacaaacgctcaggaggtgtttacatgggttcccaagggtcactcaatacatagcaaagggcagtctgaaattcacatctttaacttacagcttgattcctttcccattatctcttgtgactgtggtttttttgttttattttaatatcatacaatttcagttaatcatcctactcaggtgaaactaactgaaaatgtcaaaatatggtcattgatttctcatccaaactaagctgaaatcaaaagaaatagttctcttataaaaaattggattttaaatcaccccaaagtatttaaatttacttttctaaaagcaacaattataaatattaagtactatgaaagacatttctacataccaagtttttatcttgtacttccagtgagaactctttagccctctaaatttggaacaattactgtttgaaagcgttttcttaaactggtttgaattttcttctactaaattctgtgtatttttacaaatacagcaaagtgtttcgagtgtggcctttgtagtcatttagcctgaaatcaaactgtagctttaacacttacctgctttgtgaatgtgagccccactgtggctcagtattctcatctgtacagcagggatgataataatacctacctccaaggattcctgtgacgactaagtaagtccaaaaatagaaaatagactgcttagaatagtgcctagccctaataagtattatataataatttgttaatagtaattattattattactactagtccaattgctattcatgttataggccttgagaaaccagcgtcaatctcttccctttcgtcttctcttctgaagattcatctacctccacatttctttaactatttcctatatggtttcctccctctggcaatgctcctgattattattctccctcctaaaatkttatcatattttataaatatgcattgaatgcctactgtggtgcctggaattcatgggttgtttattcaacaagtgtaaattgatcacctctgtggcgggtgtgtaagatgctgtgaataggaaatgaatgagacagtctctgccctcagagagattaaaggtagaaggggagacagacatgtgaatgggatgatcagggcaagctatcataaaatgtcaactagacttgactcttcttgttctatgtaactattccatgatacaaacctgataaaaggaaaaaataatctttcttattcactttgctgtggtaaaatgaaaacccagccttttccattggccagttgttaaagtgaattttttttttttttttttttttgagatggagtcttactctgccatgcagtttgggatgcagtggcatgatctcggctcattgcaacttccccctcttgggttcaagcaattctcctgcctcagcctccccagtaactgggattacaggcatgtgccaccacgctaggctaatttttgtatttttagtagagatggagtttcaccatgttggccaggctcatctcgaactcctgacataaagtgatctgcccgccccagactcccgaagttctgggattatgggcgtgaaccaccgtgcctggcctaaagtgaatgtttcctagttgtagtatgtttctctattcctgaattcaatgataaaatatccaggtgacaaaatattttgtgagaactatttattactgcttcaaaattaaacttgtgtcagtgttagttaatccccttctcttcaagcatattactttagggacgggctgtcttcagcctgtttggtttgatmgacattacaacacacgtttgacctatcatgtttggtggaacctcgaggatgctcctaggtgaactgatcaaatcctttggcaacactttcagatgcagttgaaatgcagcatactgctctgcctggacaacctatgcatcactcagacttggctgttctgaataagaagggaattttttccccaaatgttctggaaatctgatctttgttgttaaatccatccattgtattaccttacctaatcctccttgcagcaactctgaagtaattattgtcatatctattttgcatactgtggtgttgagtgattaagtaactagtataagattgcatacatagccaggatgtgggagagctgagatttgaactgagacttgttcaaatccaaaatttcacaaagaaccacttgctctatggtttcagtgtttctatttctactgattatcagggctgactgtattgtttcacatagtattataattttcactttggaaagcttggcatttgaacagctaacaaggggattcttgcctctggtttctaaggggatgtttctcactttgaacatagaatctgcatttgtgatcagtagggaagaaagagtaatggcattaaatgaaggcagcactgactgtgaaatcagctatcttttaaatctcaaggttattgaattaatgaattagtcttagaaggctgtgtatcattcttagaatcctgagaaaggaaattgaatattaacccagttcacatctagaatgcacaatttatagccacatgcagactgaaccatatggtggaagcattctttcatactttcagattagtttatgttgagtgccccatatagagcaggtcttttcagagacttgtcttgtgtgatcaaaataataaaacatctgttgataataaccttgagaacaaattggtgcttcctaaatttgtttgagctatgaaatatctcctgtaataacgaacacaagatgtgcagacagcatttgaaacatgcacgcacacacatacacacacacacacataaaatttggtcatgtcacctgaaaattatgccctccagcattgccgaaacctcattcacagaaaactcagcttctttgtgaatacatggggctatttttttctctttaatgatagagtatggttgtgagttttaaaaagtccagaaaaggagattaaataaccatgcttagacagtttcatatgaggcatgtcaaagctgcatagtttcaaaacctcaagagaaagttgagccttctaaagatttagaagccaccactgaattgccaggccccaagccaccacagaattttctggctgtctggtaagttgccacaacctacacagttgtagccaaagacatactgcataccagaaaatctgtgattctcatcaaaagctccccctttcctgccctgggaccacaatctggttagaatgagcctgtggaatagtttgtagtgttttttttctgctgtgcctcctcccttcagttctscatttggcatgaggttcccttgaataggccagaatccytggtagaaattccaaaagaaaaatgcagtgagacatttttacctcctactttgtatgagtagagtaagtgcaatagatctttcagctcccagcaaatgaatctcctgttttattgagcatgaatgagagtacactatgttttaacaaagtactattatctacttcccatgccacgtagagctctccagagactttgccttgaccataagcacaattaacttttagccaactgcaaagtttctgacccactgtttacggtcatattttrtttaaaaatctcagttctagccagtcacgtcctgttcatctttttgtctcatgtacttactattaacatgttacatattgtccttctcragtctatgaaaccatatccttcacttcgttagattattcactagatagaatagattctcatatctcattttcttatagcacagatgtgatgatgatgtaataacagctcctaaatagtgagatgtactactgaagcctccattatgttatttaaattccacaaaaaacaagcatttaccttttgttatcttcattttcaaaataggaaaacaaaagattttagtaaagtaactcaaatttataatcacatttttattaaatggtagggtcagaattcatccctactattttgataacttctatgaaagtcatttttcttgctgtgarcctatgtggtagatgttatttaaaccattatacagatgaagaaactaaggcttagtaagttaagtaagttactcaatatttagggtttgtatgaaaaagccagggatagagaaaaatcatgcaactgtggatatctagaacattctttctccttttatattctcaccttgggatcgccatctgattagccagaaaacaaccctcactgtttgcgtctagtcagccactaggtcctataaattccacctctcaaattactcttaaattccacctgtattttcccagacacaactacccacttcaagccaccattatgtctcatcagaattagagcagycacctaactagtctttatgtcccaggcttaagtccccamaatgtattactcacactgcgcccagtgtgatctttgttcaaataaaccataatactcattatgctcccactgacttttagataaattccgaccttcttggaataaggcaaccaagccttacatgttcgacctctcactgaagcttccagctcatttcttaccactcccttcttgcatgtgtactccaaccacacggcatgacgtggaatttttcaaactcatgggctcctgcatttctcactcttcttttctgcaaatgcccttctccatgccctactctctttgcctgactactgcctgctcaaacttcatatgtgaacttgatattatgtccttctaggatccttccctgacataatccttaactcttggacttctttcccctctrttgttatttaaaagtcttcgtcaagrtttactgacccctgtccagtacttgttgatttcctttggtaactgctcaaaataataacagccccatttttcttgtcctttaaaaaacgtatatttgattaaatagaaaagaaaatagcatcctagttatcttccctgccacaattttgtagccatttatgggtgaaaattttccatctagattctacctagtcagggaattaaatgttgagtctctgctggttgagcaacatttattcactcagtctgtcagtcaataagtatttactgatcacctatcatgtgttctgttctgttctgttctaggcttagtacatayagcagtaaacaaaaattcttactctcagaaagcttatattttagtggggtaaacattaagtaaactaacctaatagataagtaatatattagatagtaataaatgaaatggaatagagcagatttattttgactttagtcacccaaacagaagaaagccactttatgtttcctcctaagatggcaattgccattcaaaatgatcattgcccttcaccccttggctagtctgggtgggtgctgtaatgactaccctatattggctggacttcaggcaccatcagaaaagggagagggtggaattagcaggtgtttccgttgtagaagtatcaggacactccacaaatatatcagttgtacaaacataaaaacagtctccatttcaaattagttgaggtacacacatagacacagacacacacacacacacacacacacacacmgataacaaaagaggtctcttgagacaagactacatgtgatgtaattctatttttatctgggaaggagagaccttcaaatmtttggtggtgggaactgtacctagttccctgctgactgggtgacttggaattaaccaggttagaagacactgtgtgtgtgcctagttgggtgttcagaagataagaagctaagctttaaatatgaatgtgcttttgagcattgtcaagccctgaaataacatgctgactatacccatccactgagttccagtagatacctaggctttaataaatagcacttcttaacccaaattgaaattacctstattcttttgtgtgagcctaagaaaatagtccaaggaagtaaactgtattgttgctgtgacatgataattgcaaaatgaatctgtttattccttcctcctcaggaagactgtttctacctaagtttctgattggatcagaagctctccctagatgttactgtagcacccaaggtcatttcacrctatgtcatgatagcctgtttcctaggcagtcaccccattccttccctgtgctcaactagagctccttgagggtagtatcttttgtagctgaattcccagcatctaaccgagtacaggcacatagtaagaaatacctgaaggaagaaaggaaaatgggtatctaccaaagtaagaaatccatatcatgaatcagaaaatattagagctagataaggttgacagctaattcaacactatcatttttacggattttggcaaatgaagaaatggaatgtcacagagttacaaggacttacccaggctcaacacagctacctcattagtttaaaagccagatatcctatattgttccttgtctggttatgaaatatatgaaatatttgaacaaaatatgtcttcttttacctgggcataggggtgtacatctatagtcccarctattaaacaggctgaggtgagagggttgcttgagcccaggagttcaagactagcctgggcaacatagcaaaacactgtctctatttagaagaagaagaagtagaagaagaagaaggaaaaaattattctctctcaagagatccaaaacaaaaatgattaattttatagtgaagtagttttaaatggaaatgaactgcttccagtttagctaccaactttttacacaattttttgtatgtggtttggaaccaactctaacctaaaacagaatgctttaaataaaatartcctataaatatttagcaggtacaaacctcctatagcccacactggccattttgagatgatacttctaccagtttctttgtttgtcactatcctaagaagtcatgtgacctcagttacacctctaaaactaaaaacatcaataataagaatagaatatatttcctcctctggttgccctgggattcactggaattttgttttgttgaagatattagactttggatttgctttttacattttaaatatattctgattcttgtggcctcatattattgctatctcagaagaaaaacatttgagggaaaagtattccttcaaagttcctgtctggttgcctatgctacagcatgccaacctcgacttaactgtttaaactttcatttattttttacaactattcaatacatttacaatgacttttggtcaaaggcaatgatgttcagacctacttctgtaaatatagcttttctttaaagatattctggttgtttgcttacttctaataatctgattacttttctccatttcctgtttaagacacatggatattttcatgccgtaaaaatccaagatttaaaataatgctaattctgttgaagtgctgtttcatccacttcatttttagtgatccttcaggtcttagtttaaccattactccctcaaagaaactgtgttagaccttccaattcaaattagctatcccctgttattgttctctcacttagtactggctattttattcctatttgcttatttcttgttttaatatctgcttctgtcattagatactaaactctgaaatcaggtaatcatccttgttttgtttaccagtgaatatactgtttactagcacagtgttttgcacatagtaggttctcaataaattaagggctatattaaaagaaaaattgttagtattcagtgacagagttttttcagtttttcttatgtatcgttatctttgtgctcatttctttaagtgatgtgtgtgttcaggaatcattgccaactgagaaggtgaggagactataatagggagtcaaattattttatcatgcttcttgtatgtttctaagcatctgcacattaccaccccaacgcatggtggaattctccaactacaagcttaaagcttatagatatcaggtatcttgccaacaccctgatgaatctgctttgccccagtggtaatccaatgtgaaactgaacatttttttaatcacttagaataggctgggcatatactaaattctttgataattacctccagctgtttaaccgtttggactaaagctaaagccagaacaaaaaacaggtcatgccctgcttttgatatatgtaagcatctagaatgtagaaagggttggaaagcttcatgtgagacatcaaaattaaaataaagaggtaatcctgatacacaaatcagaataaatatctttctcttgtgcttttgtttatttgtgtgtgtacgtgttcaaacgttttgtagtttatgacaaaaaaaaaacartaagtagaagaagggtcatattcacatacatatatggccagaaacataatgtcatacatgataatgcatccagttttatatgtcaatttaaaagataaataagtaattttgaaaaatcacaaaagaaaaccattctgtacaggaaaatcaatagtgactggtgactttaagtttagaaaaaacatcactgtttgggttttttgttggtccttttgtttcctgatttcttgctcttcaacccaaatattttcccctacctttgcatataaggcccattgtgattacaactgagtcacctttccatctgcatctcccatgacccccacctcatacctgctgcaatacactcagatgtggttcatcattatratcctagtgccctaatacttgactgagmgtaaacactagacaaatatgaatgaatgaatgaatgaaattctatagggtgaaagaaacaccaaaacttcctgctcatggtaggaacacgaaraaatagataccatttatttatgtatgtgtgtgtatacatgtatatgtatgtatatataaacattcatacaagtacgcaacatacaaatccactcaaagggctcagacctactttagaagatgctatggcatatttaccattagaacattggaactttatcttaggcgtcaataatctaagctgactcatttgccacttcactgacctgtcttccctgtttctctggacagctgtttctccattcttcaacatgctcatgtttcctaagctgcctccttctgcctgtatgtgaacttcatctttttcttcttttaaaaccagctttaccacttatgttttctctaatccctttctagatgttgtcaaagaagacaccacacaccctggctatcactattgggaatgtgtgttggtgtgctacacatatactggtctatttatgaagtacatgtatgtgttggtttttctgatttaaatatcttaattgcatcatcttaaccctatgttttgtaatatgtttgcctttttaataatgacctcttcttactttttttttttctctgtatgagtttgtttctcagaacaggtagttccactttcaatgagatacttctctaaaagcaaactgaagaagagaagcaactggggccatttgcttctaagtttacaagtgtaaatttcatgcatctttaccctgtagtttggttttgtctgttttggagagcagtggtttatttctgctgttacgaccatttaggtcacaagttggacacaaatagagtactaaagaagcagtaatacatgattattttaccttagtagctgcttaagaacgatcatatacagatttttatatgtgtgtgtgtgtgtgtgtgtctatgtgtgcgtatacttatatatactttatatatatatacacacacacayawgtgtgtgtgtgtgtgtgtatatatatatatatacttttccacttgtacatgtttgatgtttgataatttcttacagttgcagagctgacagatcaccctgtgtagccactgtgctctgtatttctttgtatccttgacaatgcctaaaataaatctttgcctactgtaggtgttggtgaaggtgtgatttcttctcttgtttccaaggggataagcaaatgtttaacttgtgtttctatgtagaataaaaatgttgcaatgatttttttaagaacgtcataggttgacttactttgaaacattttattaatttttggaaacttgtgtgtagaacatagtttcagactcatactcccccttcttgagattgtaattatggtaggcctatctgggcctgttgtttgtgtgtcctggcataaattcactatgtgctatctcaagaatacctttttaattgataaagttagggaatagctttatgagcaagaacttttgagaaatttctaaatacttggtatagtactaaatattgtgtttgtactttctttagtacttgaaaatattaactatttaatataggatttatatattactatatggtaattgtcttatgaaaattctaagttcgagattgtagaaagaccaggtttctagaaatttagtcctttattgagatataattcatagttcactcactttcataagtgcttttgggggcaaggaggagtgcagggaaagtgtactcatatttaagaccccataatcggcaaaatgtagatcttattccctgtaaaccttaggttaaggttactattatctcttcagtttgtctctaatacaatgtaaaaatactataaatattttcagggtaaatgaatttagtggtgcataatttacgttctcaaaaaaagcaactatatacttcttttcttaccatacactcttctgcctgacgtggctgttttgaggcaagatgacaggccatctcacatcatgtaccctgtctttggaatatatcatttgaaaatgaaattatgtacaacattcaggtttgagtagtactgagacatgtagcctgggcattgaaatttgggggacatttggacagtttatatagataatgagactgtataattgaccttgagatcaccctgraaaattcaagtaacaggctaaggtctctcacagatgccttcctgaatacccaaacttcttcctgctgccatcctcttaaagctcccccagaaggactgcagggacttcaccctttggacatatgccatctagtctgtaaatrtgtcatggttcagtagatgacttcttagtccttcctagatttcaaagttttcttttgggcctgaaggacgttctgttgtattacatctaactataatactatctcttcagtcatcctgaaaaaaactgtaaaagaaagcctgtttaggtccctgaaacaacttttcctctgacccatttagtgtactgtttcacttcattttcatytgccagcagattgaatgactttctctgggctcagcatcattaggctgaaataaaaagactgcttttaagaaaacgagttgacaacttagaagtttctagcagaacatgccaaaaaaggtgatctattttataaattgtatgttgaactctgaagttggaggaagtacttttaaaaccatacacgttttttcaacttaaatggctactgcttgtgttttttttcccccttgtgattttttggtttacccagctgcacagcctcgcttgattatatcaatgaagtgtatattgccccctaaatgcctgattgatccaattagctgaagactaaaactttttataccatgatgtaactaaggggggttgggggaatcttgaatatattaaagtcaatcccaatgcagaccgaaaaaatttaaaagaaacctgatagagaaaaagcaaattagarcagttagatttacccagtcatacatatattattcacatttctagaaggaagaattgtttttgggacaagtaggctcctaagtggtaaagagctgttttggtaaatctgtaggtaatactaaatatgtagagagtgaataaaatataggattgtatgagagatcaataatataaaaataccttatcacttttaaatcactaaaatgcagcaaattaacaaaatactccaacaaagtatacattgacagtatttagcacagtaaatcagtatgttttcatataagcagatattggatacaactagctagacaaatttctaagtrtattggttacaaaaggcctttaatctgagtcccagctactggtctaacatctcacaccttcttcctacttatccaactctctacccctattaaatggcttatagtccattcattccacacttatttattaaacatctattgttggctgctacgattttatgccctgggatataacaatgaataagtaaaatgttcctgcctcctttgagcaaacattgaaaagggggaacatctataatataaataagcaaataaagcttttagaatatgttagaagatgttaagcgttggtattgtttgaattatgtccctcccaaaagatgttgaagtcttaatctccagtacttgtaaacatgatcttatttgaaaagagggtctttgtagatgatgaagttaagatgaggtcattagggtgggccctaatccaataaggactgtttcttacagaaaagggaaatttagacacagagacagatacgcacataagaagaacaccatgtgaaggcaaagacagaagkctgagcatagtagctcacacctgtaatcccagggcttttgaaggtggaggcaggaagatagtttgagcccaggagttggaggcagcctgggccgcatagtgagaccttgtctgtacagaaaaaaggaaaagataaataccaagatcagagtgatgcatctgccaagccaaggaataccaaagattaccgacaaatcaccagaagttaggagatagacatggaacagatcatttctcatagccctcacaaggaatcaaccttgccactaccttgatttcagacttctagcctccagtactgtgagacagtaaaattattatttagagcactaaaagattacatagagctttagcagaagaaggattagaaaggttaattcggagctaaatgtaaaggaaaaccttttgatcactggggagtattggaatgtatgtcagaactgggtatgctgagagttcaatcctagtcctaaacaacaaatttcaccatttgggtttcctctgaaagccatcagtgtagtggtttggcgcactctctgaagtcatgcagacttaccttctaacgtgtatcacaatgtataacttataatcacaatatagatagccctttgataaacatccttgtcctagattatacaaaaattgtttactttggataaattcctaaaactataatggctagcttgacgaatatggcattggcactggctagatattttcaagctgctctctagattggtttgtaccacttgctgctcccacagagtatgcaaataccttgttccctcactgacattcacttattcattaatatatgtttatggaagtcccatcatgtgcccaacattgtacaaggaattgtaaatacaaaagttaactagacagacattctattaccccaaaaatgtgtagtttagtgggtaagagactaaaataactgagcagatcagtttataaaataattgtaaattaagtactacaaaggaaaaaacatagtctaatttttatctttgccagtttgataggcaaaattgttttttattgtttaaatttgcattttattactaatgaggttgaatatagtttcatacgtttacaaattggattgaaatattttttcttttctgaaatcgatatatatacacctctgttttttagttggcatgtttacattttttcttattgagttttaaaatctttatatamaacccatcaatattttgtcttttatattttgtatcagatgatttccaatgcatacaagtagttaactctgttagtatttcctttagagttttctttctttggtattatgctttaaaaggccagcctctccttgagataagttagacatgtctctgcatttttttctactgtattttccatctacagtcttcataaattttctttttgtttcttgacctctgccatcaatatttatttaagtttattcagttcttcgctaacataaaagagtccttttttccatccctccaggtaactatactaattctcstgacccttcgtggctgcatttctcttgctgcctccatttcttcatcatcgtctcactccacaaaccaccctgcaatggttactgtgccccatgagttacactccagttcttactaaggtttccaatgacctccatgttgtttaatcaaacgggatttgacatattcagagatggcaaagtaaaaatgcaatttttaaaaactttcaatagctgattttatcctctttattaaaaaaagaaagggaggaaaaaacttgattttagaatcaaaggtatcttgatttcttccaatttaaagcagtctttttcagataaattcattatattactccataatcacactggtttactatttaacaatcacactagaaaaacaattaatttcactgttcaaatttcttatcagggctatttttaaatgtcaacaaatcttcacattgccttgaccaaacaacttggaaggataagaaatcttatgtgtcctctatggtgataggaacctgtagcttgtgttgtcctctgagtccttgctgcctgcatggctatttctttgtctttcctgaccactgggtttcttattgacagctgtgcctgaagcctacagtggtagaacttgtgatctaggctttcagccttgtgagatcctagtacccccctacagctgacttgcccccatctcaaaatttgctgaccctaaagatcctcagcatcataactacatcttctaaattatagtggcttaggttgtttatctagaagcctctgtttggagggtcactttattcagcataataatctcacagaaggcccactgattctcacctgcttgcctttgaagcaccatcggaagtacatggcaacttctgttatggtccatgctacataaaagctatgggtaaccaaaaacttgtgtgtgtgaggttggatttgtagtattataagtactgtctcagctttaatcccccttggtttgcatacaaccacctctaactgtactatactggaatttagcacgtgagccttgtctggcagtaatatatgtatttgactaataaaaagtgaaaacaggccaggcacggtggctcacacctgtaatcccagcactttgggaggccgagacgggcatatcacctgaggtcgtgagttcaagatcagcctgactaacatagagaaactccgtctctactgaaaatacaaaattagccgggcatggtggcacatgcctgtaatctcagctactcaggtggctgaggcaggagaatcgcttgaaccctggaggcaaatgttgcggtaagccaagatcacgccattgcactccagcctgggcaacaagagcgaaacaccctctcaaaaaaaaaaaaaaaaaaaagtgaaaacaagttatttctcaacaaatatgatttcttatcacatttacgcaaaaaaatgttggcactatttaagtgccatgtctaaagacaataaatctagtttgtttggcagattcaatmtttcaaaataagatatccatgagagatcaaataatcaaagaggtccctgattatggaagtctaggacctctttgacatgtaccgtgtgggactgctattgtcaagtttatggtaaagaaagagagaaaatgggaaggagagagatccttcactaaacatttgttaagcrtctatcatgacagaaacctttattccacaataaagatccagagatgaatacaaattattttccaccctgctagagagattagtgaggtaaatattcaacaaatattgtgtttctttatgtagcaactgatatgatagaagcgtgagaatgaggttctttagaatcacagtggaatttctggatcttacaacctgtgaggtaaggggagtctgctcttttccattgtcaggtagaaataacaactcatggagaggtttgttttatcagaggacacggagatcacattttatgtcacctctccagagctttcttggatgatgtagcttttctggttaaacctataacataggaaaaaaacatgtgctggtagtggtcagtacatttcaaaggtgaatacctgaacacgccacctgaataggctttgtggccccaacaataccatctatcacctgaggttcatagtaaagtatccttcactgaagttttttgtttttgttttcttgaaaggagagctcttttgaatgacagtttgctagattcaatattgcaaaatagctctcaaccgactttatttttacatgcatgaatcacaaaatagaatgttgacaatttcttgcttagttctttgtgagtagaatacattctaaaaataattttgtgaaacacatttttatactaatgaaagcacatgcctcaacttcagaaaatttctcctatatttctgatgtggtaagtagacctgcttatggagcatttacagtggttgccaggaaaaatatattaagatataaaaaatcatctctatgtacttagttgccttttgggccgctatttcatgcaaaagaaatggttaagggattggttaaataatatatctttgaggcttaactttttggagcacttcttctgaagtaggaggccagcatcacactggagactctgaataacaatttactacagagttggattgaatgtaagcaggattcatacagtacccggagcagaggagcttagatacaaaactcagtgaaaggactacatttaaagtgtcttcatctgccaatgaggccttataccttgattctagggttcagctgtagaggatccagggttaatggaggattaaaagtaatattgtcttatgactccaagcacagcatagacttggctttgacttggcttttgcattataaagagaatatgtgaccttataccaagatctgataacccaaggcagtatgaaattatcaatatgaaagaggagtagtttattgcatgcctattgcaaagtgcattacagatgctttatacattttaaccaattttaagcctcacaacaactctatgaagtattattatgcccttttgcaaatgttgaaacagactcagaaaatagtatcttaccaatgaaacatataataagtagcagaggatgctactattgaggactgacttttaaactcactttttttcataaagaaagtacctagcatagtccatgacccatagtcatgtctctctgcaaatattaggggttttttttccaatattttccttctttcttctttgctctccttccactcttctcttttttgtaacaaattgccttttataaaagagcatagactttagaactttagaatcataatccttcccctcttcttaggtagaataaattgttttctcctcttcactaatgtgtggggtgygtgtgtgtgtctatgtgtgtgtgttatatgtttggtctgtctcttccatgaataccacgagattataaaaaaccttcaagggcaatttaatttgctacctcaaattgaatgtaattttctgcctcattttaagcaatacattcaagcactgctttagtgaaaagaacattagtttattcagcttataaacactttttaagcctctaatatgtgctgaaaatgagtcaacatctcccgaaacacagcccgacaacttttttttttgtttgtttgccctaggagcatggaagttcaaaagtaagtgtctggtgtgcagtagattgagagttgtgaactcataggctgcttgacctcatgcaaaatttaggagcaaaaatcttggtgaagacaggcatcactggtcatcagttgactaatcagtctccaacttaatgggacattgacatgtcctctccccaggtgttctctgaaagcactgagagcttaatgagaaaatctgggttcaggaattattattttattttattttgagatgaagtctagctctgtcacccaggctggagtgcagtgacgcgatcttggctcattgtaacctctgcctcctggattcaagaaattttcctgccccagcctcctgagtagctgggattacaggtgtgcaccatcacacccaactaaatttgtattttcagtagagatggggtttcactatgttggccaggctggtctcaaactcccaacctcaggtgatctgcctgccttagcctcccaaagtgctggaattacaggcatgagccaccgcacccagcccagaattatttttcaccactgattgttttaatttgagaaagccaagtgaccactgagtttctatagcttaacttggaaaatggggctgataagtcctactctatctctatctctcagcattattcaaatataaaatttgaaaaattatacatattatctttaaaagttagcaaggaaaggctgggcgcggtggctcaagcctgtaatcccagcactttgggaggctgaggcgggcagatcacaaggtcaggagatagagaccatcctggctaatacggtgaaaccccgtctctactaaaaatacaaaaaattagccaggcgtggtggtgggcacctgtagtcccagctactcaggaggctgaggcaggagaatggcgtgaacccgggaggcggaacttgcagtgagccgagatcgtgccactgcactccagcctgggccacagagcgagactccgtctcaaaaaaaaaaaaaaaaaaaaaaaaaaaaaaaaaaaaaattagcaaggaatataagtgagagtaaacatatatgagttgtcacatttattgttgttatctgtgacagtgacttttaaaaaggaggagaaaatattttccataatactggctactgtataatgtggacccattgcttaagtgacctatatattcatttttgatgcattcattagttctgtaataaacatagagtacctgctatataccagataaccagggatacgtattatgaacaagatgggaacataataattctggaaggaaaatattactaaccccattttatagaagagacaactgagactcaaagcggttaaataacttatataacattatagctgtgaatcctttccatctataaaacttctttggttaatgagaacccagtaaagtgaggactgtgcctgttttgttcaccgtatatatccagcatgtcacctattgccaggtaaagagaaggtgttcaataaatatttttaaatacataaatgagtgaataaatgaatgaataaattaatgaattgaatgaatgagcaagagtaaagacaaaagaaattagagtagtgttgtagcttacaatccactgattttatgtgcatgtttatatacatattctccaactgaccactaaaaccacataattagtgactgaatgtaaggatatagttattcgaaagaatacatacataatataagtttacacactgtgcttttaaactcagctcaaaaattaaacattgtcacctgtgtagcatgactatgttagcctctttcttacatgcctgtagttctattttgttggttgccataatacaaatttgctgagtggtgcaaactactaagttactctaagccacccagtctagattatttgattaatttttaatgaaggaaacctattttatctttataacccaaatgatttcaggctcagtgtctgtcatccagtctctttacccactctgtggcagaactgtcatgtgagtctgtctagaccactatttaatttatctgggctttttccccgctttatttttgatgcagtgatactgctacaacctttctcagagtcattgtgaagaacaactttaaaagaatgaatgctaaattactaccggtgtatcccctttaatataattcaaccactgtcttttaaaaatttttgccctggggctaaaagaaataaatggggtagacaagatagcagctttcttgagtgattcaatgcctacccttttttccatttgggtctacttagtttatctattttcaggttgcatactggtatgtaaataccttttaacatggtgaaataccgagacaatggacaaggttttatagttgataaatgggggatggaatgtcaaatgagccttacagacattaggcacacttgagaattatctacttttttgaggagtgaaaaagaatatccacctcactgaaagactggccaattcttccctttgcctttggatgaawtgaagttgaaattagttcaggcatcaagccaattctcttcctagccccctccttccagccatacctccaaataatcagttaatgcaaagtatgctgcctacatcttccacacaaagaaaataaatgttccagtacaaagtcagtaggaggcatttcatatcagaggaatttttctttcatttcattgcatttgtatttgtttagaaacacactcatgcttttcaagaaagggtttcttagcttctaagttgggccttattataggtaactaataagatgttttaagccaaatataaaaagattcgtatactctttctaaatatctatttaagaagtgaaattcttagaggtttgttctgttctgtgaagcttgatacatgtgcttgtttgagcgaggtaaaaagtaggtaaaaatggggcacatcaaaaaataaagatgcttttttctgtataacttctttaagatttcctgctttaattctcaccatgactattaagcaaacacaacccttatttactgtacaagttcagtctttttaaatgtgattcgtatgtgtgtgtatgaatatattacctgtatgaatatatgatatatatttatatatataacatatatgaaattcatatatatatgaatccagttgtaatgaactaaaacgctcatctgcatatggtctcatccacccctactttgccgtggtggttaaaatcttttggactcatcctaggatgagagcaatatgtcctcaggcagatttactaccatccaatattaagtgctgtgaaatagcggtatttgggtaataaggttttatctctaaaatgctgtgttgtgctttgctaccagagatttgtgccctgaccttctgaagaagctgtcgttttcaactcagctttaattttttttttttctgaggttgtcacttttgccatatggtagatgtttcttctgggagagaaggagctgcatgcacaaaaactttgagggaaacattattgtataatttgcttgagrtcgaagccaatactctggaggttggtctatcatttattgtaatgtggcagatattagagggcttataaacacgttttgcttttgaagtgtattcacaaaggattgaaagtggcagaatgtggcaagtcatatttatgcctcagtgagaattattaacctgcctaaagtacaagatagaacaacattttttgtgagttctgcttacccttggacttcagtgtaggaagatactttagggaatcaaagaagtgactggaaaatatctttttggtggcagaatcataaaaatgaattttatttctaccgcaaattagaagaaagtaagtaccccatcttcctgcttctgctgctgaaaggatgagtaaagaacaaaagaaattgtttatactcgggttaagtaccttctaaaagaaatatatacctctgtgctgcactttaattcagtttatttactttaccttcaggtgtagaaatacattagaattgatgttgagaattgaaaagttttatattgtgttcttaaatcttttgtcaaatatgaactcgttagagaaaaatgatttaggctatacttcactctagtagatgggagaagactctaagagaaatatgaattagatttcaaagtttattttctcttaaagtctgatcggattttgcctgtgattagggaattaaggagaaaccatggaggcaaattagtttctcaggcttccatcgggcaaactgttactctagtacacatttgatgcagcaggaggctgaacaaaktttttcttcttcaaatggtgaactgcttgatcttttgtagttgatagaagcatgagtaaacataaataaacatggatttaaatatactaattagaggaattactaagataaagccagctgggtggtggtggctcatgcttgtaatcccagcactttgggaggccgacgcaggtggatcacctgcggtcaggagttcaagaccagcctggccaacatggtgaaaccccgtctctactaaaaatacaaaaaattagctgagggtggtggcacgtgcctgtagtctcagctactccggaagctgaggcaggagaatcgcttgaacctgggagacagaggccacagtgagccgagatcgcaccgttgcactccagcctgggcaacaagagcgagactctgtctcaaaaataaataaataaataaataaagcctataaaatgcttacgataataatatcaataaaaataaagtttgcattaatttatttattcaacaaatacttattgcatatttattatatgccagccatggttagaggtgcccataaattacattaacatagtttttttctcaatgaatacaattcttataatataactgatacatgtggcagcagaagtaagttcaatgtactctgggtgtaactgaacccaactggttatctgaacccaactggtgagtcacacaagcctcacagagcagatgatgcttaaaccacgtttagatacatgaggaaagaaggcttagaaatggaaatggaatgagtgtctttaggaatctataagtaggagttgggaggaggaatgaagggagatgagaaaagcccagacttaagctgaaagacccaagtagaaaaccaagtctcccacttagttccttttcattcattttaaattagttgatttattcatctaactataatgagggagcacatatgatatgtgcagaattttcggaatgactaggatagatcagagacaaccagagggttaggctaaaaactaaagcaggctagaaaataaggcaaatacacatatactccgaacataaagccaaagataaattgctttaggaaaggtataacccaatgtgctctaggaccttagaagtgggagcagttgstttcatttgtaaggattagggtgcgtgagatcaagtgagacttcttggagcaaatgacaattaattcaagccctaaaggaagaatagaataagaggtgagggaaagtctgagagcaaagttgcaaggcttatcaggaccatatatttacaaagtaaagtgaatastggggtttgattaggtgacgcttaagtggaaaaccacagtgagaaataggcgttggaaagcaaagtgcaacataataacaaagtgccataaatgttatgcctaataaatttagactttattccctaagcagtagggagccaatgcacgtttcacttgtccctctaacattcatttgacacttaaaatayactgacatttaatgtcattttatgtttatatatcctgcttcttcacaaaatggtaaattctgtggtgttaggactttagctttacttgtcatacacatgtgatatggtttggctgtgtccacacccaaatctcatcttgaactgtagataccataatccccacatgtcatgggagggacctagtgggaggtaattgaatcatgggggcaggtttctcccatgtcgttctcctgatagtgaataagtctcacaagaactgatggttttataaaagggcagttcccctgcacaggctctcgtgcctgccaccatgtaagaccttcaccttccaccatgatcgtgagacctccccagccatagggaactgtgagtccattaaatctctttccttcataaattacccagtctcagatatgtctttattagccacttgagaatggactaacaaaacatggaaagtatttcgattgagcaggacagggatatcctttttattgagtaccttttatgtgctaaacagtatcgaatgcttttacatttgaaaacatcattcttcacaagagtttaacaatcactgttttaaaatgaggaatttaagagaagttaagaagctagcccaaggtcacacacttaataaataaagtccaggatcatcttacctcccaaaaggccccacttgccagtgctcttgcactgsggattaagtttccaacacacgaatttggtggacatattgagctcatagcaggaatgaaattccagtctgtgaactctaaaacttatacacttttcactctattaccgcttcttactgattgagacactcatttcttaaacacatatttattgaatgtttattatgtgtctggtgctgttctagaaacgagaatacagttagtggtgaaaatgacagaaaggttcctgcctcctggagcttatactctagtgaggtactcatacaatatatatgcagttaacaaaataagggtagatggtgataaaggacatgaagaaaataatagggtgataagataggaagtgaccaaaggtggtaatgagaagagtagtttgttgctatcagggcaggctcctttgaggtggtaacgcttgagctgggatctgaagaataaggacgtaaaaatgctagaggtagatataagagcaaatacaaagtctccaagatagaaataaacttgaaatgttggaggaccataaaaggggacatgataattgcagtctagtaagggagaagaaggatacaagaagtcaaagaggagacaggtgtccgtgacttaaattttttttgtcccctgcaaaactaaaggatttagatattaaccaaaatgctcagggttgcaaagaaagcaaatatactcctaaggggaatggagtgcacacaatccagcctttgcctacctccacctcccgtctcccaacatatacctgtgatggaacattgaactcacttgcttccagaaaatatttctttttcctgggtagaggttttatgggcagcactctgaagttagaattgtttgaataccaatgaatagattttgagcccagtgagaatggtgggctgaggggagtttggattattgggtcaaataagttctaatcttaacctagcgttgacatttacacatgacatcttttagtaaggaaatagactctacaaataaagttgtgtaaaacagaaagttaggtctttgaaatccttaccactgccaatgggccttgcatttaacaaatagaatataaaactacagactaagcatagctttaagaagcctgtaactaatagctacttggtacaagaatgtgaagtcagcccaggtgaggtggctcactcctgtaattccagtattttaggaagctgaggtggctgaatggcttgagctcaggagttcgagacaaggctgggcaacatggcaaaaccctgtctctataaaaaatgaaaaaaaaaaaaaaatagccaggcttcatggtttgtgcctgtattcccagctacttgggaagctgacgtgaaagaagttgtagtgagcagagatcgtgccactgcactccagcctgtctcaaagaaacaaaaagaaaaaaagaaaaagaatgtgaagtcatactaggcrtgaggcagtaggaaacctgggtgcatgcttttaaaatctccgtgcagccgcagaaaaacacatcatattgaaaaatcttttctctttaggagttgattccttatagcatgttctgaggtggtgaatagtattattaatttgataagcattcaactatgatagatccatctccatcctcccctcctcaagcactctgctgcctcagctccttgagttcgctttcaaattaagaaaaatggatgatagtcaagggtgatttcaagaaattataatgctggctaatactacctagagcccttggtgtaaataagcttactaatatttactgagcccttccaatgtatcaagttaaatgctttgtcagaattatgtaacaaaatatttacaaaaacagttctaaaacattttggtctcaggatcctttttacacttaaaattcatgaagagctcctatagtttatgtgtattctgtctacagtatttaccgtattcgaaattaaaactgaaattttttataagtaataatttatttataaataataataaacccattaaatattaatgtaacttaaaaaaattaaaactagttttattttttttaagccaaaaagagtagtaagtagaagggcattgttttacatttttgaaatctttttaatgtctggcttaatttaatatagttggattctcatatctttataggacattttttttactcttctgtgaatggagaaaggcagaatgttttcataggcttttcagataactgtggatattctttgataccacattaaaacttgacaaatggtcattctttaaagtttagctgcaaggtggaatctgagactctatcattgaacttttattaccattacattaaaattcgttcatctatcttgcactttaaatgaaccttttactcatgtatttttgtataatatgtattggttgattgaaaattactgatttattgattcactgagctatgcagattctccaaatgttgacatacttccctatataatatcaaaaaatagtatttgtcattattatcacccatcctatcagaaaaaaaagtttaagtcagaaagcttgtcagctcattggtggtgaatacaaagtttccaaattctaatgtgtgcttgaaaattcaaattttgctattgaccacaaatattggcaattattttccttaaaacaacaatctcactttattagttttcaggaatgtttttgtgaaatacccgaaactgaataaccagtttgtatgtcagtcattcttttaagtaaaactgatgttcagtaaatatgtggttagtttagcttgcaactgaaataattgcacagtatttttatttttctatagaaaaccatgtgcactatacaatggaagtgttttatgcatatatctcactgcatcacatagaatattataaagttatggactcaaaggtcaatatttaagaaaattaataatttttaatgcctcatcaaagatattcttaagtaaaattaattttttgtgtgagtgtatgggagtgaagaactctatgcttactagcatacttcggcaccactaccttgatttgtactaagacaccaacagttatctccattgcttttgtaccatcagcacacaggtgaacacagtgaaaaagacaaataacatattattatttgatcttgaagatattttgagtactactagtttataaccaatccaaaaggtattattgttccgtttgttctggtgaagaagttatagttcagaaaacttaagagaattgttcagggtcacaagtcaagagatagtaaagctagaatctgaacacagcagaaatgattacagagcttattttctttatccgttccaagggagtagcacctaatagatgacagcaagtgtccattcccatccctcttgcctagtcaaggttggtaaaggaaagggtgttaaagtcttgttaagtcagaagtacagttggttaatcgcatgttaccattttaaagggaagttattttaaagaaatacaaatttatggctgtagcaaatgagaacctacagtattgccaagaaatactagaagaaataataagtgcacaccgccagaaaaaaatctctagttatctgcctaaaaaaaaaaattctcatggttcagtaaagagtaaaaacagagtaaagagtaaaaagatattgttttattcaacatttagaagtttttaaagatttggaatagaaaaaaaacagcaggaacatctaaactgatttgagagaaagtgagaaaattatacttctggaatgaaaagtggtagtcataaaagtggtaaaaaaaaaaaaaaaaaaaaaaaaggaaaagtaaaaagaaaaaaaaaaaggccggatgcggtggctcatgcctgtaatcccagtacttggggaggccgaggcgggtggatcacggggtaaggagatcgagaccatcctggctaacacggcgaaaccccgtttctactaaaaatacaaaaattagctgggtgtggcggcaggcgcctgaggggaggctgagacaggagaatggcatgaacccgggaggcggagcttgcagtgagccaagatcgcgccactgtactccagtctgggcaacagagtgagactctgtctcaaaaagggaaaaagggaaaaaaaagtggttaaaaaaaaagtcattctcagatgcttagaatttatgatatcctggtcaatagaaaatgaggaaatagaggcagtggaaatagaaataaaaggatgaaaacaagagttactcaagtgatagaatcaataaaacttggtaaatgatggatgagaggacccagggagagaggagccaatggaaaatgggaaatattgtgccgtactcatgctgttccccatgtatatggcacatctccccaactagactgtaagctccttgagaacaagaactgtacgtcttttatttggtttgcagaatttgacacaatgttgaacagatagcaggttctcaaagaaacaaatgcagaattaattaggtgattcaaagtttagccctcctacattaaaatttcargtaaaccccttcacctgacccttccttattagctcaatcatgcaaatattttggattattcttcagtttagtttaactcatcaaacatttactgagcatttgctgtcaatgggcattagattgagagagagaaatacaattgcaaatacagtggggcccctgccttccagatgctgaggatctagagaaagagagacacagtgtgaatagtgtctctctcacgttatgaatgaagttttacggaagcccagaaggaagggcctttgcatctgcctgaagcagttggagaaaacatgagagagcagttgaggtggagtttgatatttgaatagaaattcaacagcaaagaaaagaagaattgcagaataggaaatagttcagttcaattcagtttatacaaggatttattcagttctgttcatgtacaggtactatgcaatcctggcatggaaaatgaataactaagttttgatattttgcattgattctcacaatagaatagggaaaataaacatataaacaagtacaaaacaatgtgctgtgtgcagtaatgaattgtgartcasttagagaattatatagaggaggaaaatgaaggggaaagtgaggagttactctgagtcaagcacttttctttatgtgttcctcgggatatataaatctacacagaagaaagtacaagctagttcactgaatggtgagcagtttacaaaatggcgaccctcagactatatctctggcttgcagatgtgtttgctcttcacattgttggcctgtgggkcagtcatgargatgtgcttcacagactgccaactacagggagcataattcacctggaacccagctgctaagctctaaaatctgaaatctattcttgagtttgccccaatggctcctctgagccagtgacctagtgctgcatggctactcaggtggggccttttctctgatggactcagagaaaagcaatgaaggatacttccaacctatcttccttctttctgtyctcctctttgggatcggacttgcatggtgatctaatagctcttctagccttttctggatgcttccccattttccttcacaagcatttcccctaacaaaattcttagatttaatcctgtcttgacatctgcttctcagaggacttggactagtacagcctaatatatatttacagatataaattcaataattttctaacatttaaaaattgatattttacttaaggaaatttgattcctgrcttctctggggtgtggggagggtaagacaatcatccagtaagaggaccccatttcagagaggcaataacccataaaagctgaatggcaggttatcgctttagatgagatacgttctcaacccgcacttctgttttgtttccaatacgaagatcagttgtcattaactcacattcttgctctgttgttttacctctcctgggattacttcaccctcctatatgtgttttctgccttcataggcattggagtttgagatttgttgtttttgagcacatccttgcatgagaaggaaggagwgaagtgagtcaggtgtggaagccagaaaaccaatgaggagaactaaagatgttctaaactagagagtgatggcagaagtcgagaggagctggatggatttgaggggtatttcaggggtagaatcaacaagatttgagttttaataaaatgtagggaccgatggggakgcaggagtcaaggatgactatcagatttcttgctatggtaataagaattgttgagcattcttgtttcttccttattttcaatacacaaaccagtctaaatagacatctctgctttaatccttttcagaacacaagcagagatgtcattagaagtagaagatttgatgggactacaaaagaggaactcactccattattaccagcttacactggaaaaatgatcaacaaattaagaaactatgttgggagctaatgagaagtacatatttgctgccagtagcattttggatacatactgttacaggacagaagactgatgttacttagaaattttgtagttggagtatcactgacaacatcttaaatcagatcttaagaattaacagcttaaatattatatttgatcccatattgctctccttgctttctgactcaatccacccagcctattctaaattcagcattctaaacacacaatgcccttgaattaatcatggtaaagcatcacatttgtcatatcgctccttactcagataacctagtttctccaggaaagcccataatcctaggtctgtcactcagaaaactttctcatatacccttacagttgtggggaccaaagtagataactttgcttagaactttttcctgatattcctgcaataacccaccctattttctggccagcatcttgacttccttaagtaggcaattgtaaggtctaacacagtatctgatatatagcaagcactaaatgagtgttacctattattttttttttgacgatgtaagtattttttttctttctctccattaacaccaacatatttctcaaactgaaaaaggcccaagcctaagtcttgatttacatctcccaaactgctttcctcatcctcaccacagtcttctcatctcatacacagcawccctgtccagctatgtgtcacgtcatctttgattcttctcttttccacctttcacgttccagccatcagtaagtccagtcatttctaccttcaaattatgcctcaaatattgccatccccattgctatcagcctagttcagatgccatcaatttctgacctggactacagcaacttgcctctctgttctccccttcagcactctccaataagtttgtacacaataaaaagtataatcttaaactagatcagataatgtaattcccctgttttaagccttttatgacccaaaaacttactgtccccagtgtctgaccccctgctaccttctcttgcctcagctcttccttccctttcttaccactgcatagctattctggtctcaatttagtttcttgaacaagtcaagctctctcttttccttaggccttagcacatcttgttcctctgccaagaatacttaactgccacactacctcacatcatactcctcttctcatcttttcactgttctctccttctaccctaggtctttcttcagtttcaatgaaaaatgttagccattttttctgtctttaccatctttttgttttttaaatctccttctgtcttactgggaaacttcagtgtcagctacaaagtaccctgacttgatcatcacctcaatacactcttataacttgacctttactatactcacatgactaacactgagtgctgctttatctccaaaatattgaaccctgaaatctgccaatatccacagcctgttgctccctcttccttcccctgctctccataaatctatgttttcaccttatcgtatctccatcttttcaccctcttctgttcttccagtctgagtatcttcccttacgtctcatattttcctatcttttctaacatgttactcatcacttacaaagtaaaccatatctttttccccaagcctcagccctaaagcaaccaaatcatccctttcactgttcaagattactaagctctgtgggagaaaatcccataacacgttgatggcatcccaccatggtgctgcttagcaggctccagctgatccctaagtgtctctctcttgcctcaaagctgcagttccaatcacttacagctttacttaagttttcaacttcattctagacctttccctctgatgtcctgacttctaaatatatggagtaaagacatctaatcagttaagacttccttcagcctccttctcctctaccttaaaatgacctttaatttcttccaccttaaaataatactataacttaccgtaggaactcagttactcttatctcagagggcgaagtattcctccccctacccatggctgagttatgctgtgtcaaaagcgaacttattttttctaatgttacacatgttgtacaagtrtaatgtgtgtgtatgtgcatgtgtatacatgcatatgcgctcattgcaagatatatttataaggaaaattaaagatggagtgctcaaaatgacaaaagaaaaagatctacaaagcactattaataaattaatcagcataattacaaacttttataatgcatgcatattgtaaagtgaggtcaaagtttaaatcctaaattgtctcctactttatctacaactattttgtaaagatcttttcatgtcagcacataaacttatacaatactgttgtattgtggctatactacatgaaattaagtagtacctatggtgggactcaaagagtctgaactctgggccccattctcactcctccttcaagattatgtttttttgtgtgctctcttctctcctgtaccttcaatctccctttcccaggggcttctttcctttagactaaagagatgcttgagtcccctccctgccatcctccaaaatctttcctctgctttttctccttctctttcgatactgccacatatctcccctaaggctaaaactctctcacacacacacacacacacacacacacacacacaccctaaggctaaaactctctctctctttctctctctcacacacacactcacacacacacacttctctcacacacacaccccctaaagctaaaactctctctctctctctctcacacatacacacacacactcactcaaacacacacacacacacacacacacacacaggataataatctactttcactgtgtttacttttctttgcttctcaggagttctttggtctacaataatctggcattctctcttggcctatttattaaactgcttcctctctaccatcccccatcttgttaaagcatttttatgtaaacatttaccaatccccaaatgaagtattctcctgatggcttttctacccagcagcttccagaaaaatacaatttaatagaacaaactatggggcatcctaaatgcaattcctgtagattgtataattgtgaaaagggcatttcttattcctggactaagcactttgttccaggacacatacattattagatagcatttaaaaactaaataaaaaatttgaggaaaaaaatctctatttagcaatggtagttagaaatgtctgcattattttctcaccttcacatcctagtaatagacctggggctgttcatctttagatatcgtaacatgagacagaaagtggatgtgagaragactttaaataattttaacaagtaatgtgtatgaaaagacacctttttattccctgtgccactccagatttacttttcaaagtaaaatgacttccaggacaatttggaagattatttgccaaccaacagacctttctatcaagggacatttcttcttctggcatgtagcctaaatggttctttattttaacttcttattacctgttttaatcttttttgatatctttattctacctacttatattgttcgctgtcctattatcttcatggccaatgttcaagtggtagcctagtaattttcgatcagggtgcatatgagaaatttacagattaggggctgaggtatgttatatttgaaaacaacatatagttttgtagtataaactatattaaattaaaataaacaaatggctttgctggaacaaatatacagaaggtaaacttgaatatcgatgatggttggcaagtagcaaaaggaacagataggtgttcctgggttaagggaagcatataggaatcttggggttagtgagaggaatataccatttcaatatttatcaaatagaacatgggtattaaaatgttaaaagaacattatttgagtctttttttatctagctgttttttatctaaggtttcaatactataacctaatctttaccccaaatttagtacttctagctaagttttgttttaacaaagaaaagtaacatatattatcagtgtaggttaaaatgcattaatccatacttgttggatcaataaataaggcatgaattaaagaatacattgtttgacatctgttctcccttactgtcctcaaactcgtaaggaccctttaaacagtgctatgcatcaaaccaaaggaattgaactmacattgcttgatcatcacccatgtgctgtgcttagcacttgctggtgcctgtgtcatttgaattcatctcattatctccatttgacagatgatgaaactagactcaaagtctagtttcaaaatgtatccaataccatgcagatgtcaatggcagagccagtgtgcaaacccaggttaaaacgacccagatctatgtttttccactaaaccgtatcactttattagaaatgttttgaaatattttcatgatactgatagaagtttaaatcttttccaaaaatccaatgaagyggttccttataactaaaatttgtattacttccctaccattgcattagtttttgaattcagaagagacaatgtgatataatggaaagaaaatagtaattgaagtctgagaattacttttaaatctgaattcactatttacttgcttcacgtctttaagtaagttacttcactcctctcagcctcagtttttgtttgtttgcttgttgtttgtttttcattctaatatataaaaagagaataatacaatctaccacataggaaattgtaagaaacatagattagtgtttagcatagaataagcrtgcaataaatgttagttcccttaataatgcttttagtattttactaggggctttataattttttaaaatctccttcttatgtagtttaaattatttaagcaattttactattattaattaaagttagtaattttcttgttaaaattaagtcattttaaatgtcttcagtggcaatcatactgtaattaaaatgtcacttttttctcatatttatataatcaacattttccgtttttattaacagcactaaaattttatttttaatttataacttttagattctgggggttcatgtgcacatttattaaaaagttatatcatgtggtgctgaggtttggaatacaattgaacctatcacctaacaagtgagcatagtaccagataggtagttttttaacctttttccctttccttccttcttccctcttatatttcccagtatctattgtccccatctttatgttcatgtgtacccgatgtttagctcccatttataagtgagaatatgcagtgtttggttttctgtttctgcattacttagtttaatggcctccagctgcatccatattgctgcaaaggatatgattttattctttttttatggctgtgtagtattccatggtatatatgtaccacattttctttcagtccaccattgatggtcacctgggttaattccatgtctttattattgaaaagcactacaattttaatgactccaaactatccccacattcagataaatgtaccacaatattttaaccatttctccatgatatggatgtcagttttcagttgtgtttttttaacactagaaaaataatgcaacaaaccttgaacacaaatcttttcatgtttctctgattatttctttaggataaaatcctagaatcgaatgatcaggtcaaacagtattttaaagtagaaaaattctaaaaatcaaaaaaaaatcattgtcggtacaacattatatataaatgaatgtgattataatattactacttattttcctcttttttattatatataaccccattttgagagaaattttcatttgggaaataaacttttaataaaagtggggctttcccagagacattatatttatatttgtgaaatgtctttccttttggtggattctctctctgagaggagatggtgtgcagtacatgaaacaagaagtgtcatttggctagaaaatgggtttgtgctcgtggggaagagtcagcaaatatgaacaattaagagaaagaatggtccatgtcagtgacattcatctgtcatggaatcttcccaactgcaaggacacagcagcccacccagaatcctttacagggtctgcccttaccagcatggcaccttgaagtttccattgactgcatcagggatcaacactcggttaattagtcacaattttcaggatctaagagtgtcaaccaggggtctgcctgttcacatggagagattgctgctcagagaagagaggagctgagatctgtccctgcagctggcaggctctgggacaattgtcaggggattgaagtgattcagccatagagagcagcaggcagcaatttcaatgacacttttgcatctgtccctctctctgctaaatgctgctggctggtagcaaagacttaaaagggaaggctggaagagaacaataaagggaggtgaaagctctttaaatcatttccttagctgaattcagatgaatctcttgtaaagaaccatgatgactggccagacccagctggtagactagttttaattgaaacacaaaagctttcagggatgctttgggaccagaaacacagggcaagttacattctgtctctacctacctagtttccactgtaaatttcctaaatatattcattcttttcctcagagtgggtctggggacaggggaatgtatattagaaaatgccagagccacagttttctccatattgtagtcaattcaaaagaaaaacagtggttaaatgtttctaggttgttatcaaagctattatttcaaagacatattgattcacagactaagttccaagaatttgacagtgatctacttcccccactaaatgtccctaaaacatccccttttctctgttggcaagagcagacttcctatatctagccagagtcccaaaagaatcctttaaaatcatccagtttaacctttcaataaatgcctgggtccttcacgcccagtgactagccaaatacctcctgagtgaaggatcctctatcccttacagagtagtgcatctccaatctgaacagttgtgtcttattagtcagcctttagctgcaccacagtttgaatgcctgagctttctacttttttattcttgtaatgacacagagcaaaatggcttctacttccatattgtattccttaacacattgtggatttctattgtggcctttttgagtcttcctgttagggcacaaacattctcagtaggcttgtttttctgttacttcattcatcaagtatttattgtcaatactatgtgctagacaaggctccaaaaaaacaaagatgaatactacacagttcctgccttctacaagcccagtttaaaggaaagacagactcagaaacagacaactacaaaataacacaatgcataatgtaagtaagcataaaaacctgcaaaaacacagaaatgtgatctatctagagaagggttgggtgataatttagtattaatttgagcagacaccgtctgagccacatcttcaaaaatgcgaagaattgaaatagtcaagaaggcgatgtgaagtttctggtagagaaaacagcataaataaacaccaatagatgaattatagtgaggtctgtgcagtaaagagcctgcagttcacttcattgttcctggggggtaaagtgtgaagctggaaataaagttgacaaggttaagagttagatcacgaatatctttctcacaggacaaagttttgagtaccctctccaaacatgttgacagtatcaggagaaagcatttgggtatctcccaatctctgcttgcctccttccctactctcattaatcaagacattattatccctgagatgctaactacagtgagaccaatatactctagttgatgtacttagagcttgacccaaattacattgaaaatactcatcctcccattttttcttcccaaacctctggatcttagagaactgcctcattaagtcccctaaacactatctccatggctacatacttgacaatgcagttgaggttatacagtacgtgaaatatactgatcactagatgccagagtattattgcttttttttgctatgctttgaatatccatgaaggcagaaaccatctggccttaacctctgcagtcttagtttagagtcagttgcatacgaaatgctcaaccaatactaacacagtcatttggtgtcagtaagtatttaaaatccaaaatggtttctcgtacactctgctcttgtcaatttcatgattaaggtacatctatccaattcttcttgctttctttgttccaactttattgtctgttccttgggtgtggcataccctttctcacctaagggcttttacacaagttcttccctctatgtcaaaatgttcttctctatgtcaccaggtcactgtgtttggttctcctacccactcctacactctgcatttccccttcatgtgccttataaactgacatacttactcctgtagctccagggcttagtctagtgccaggtacagaggtggtgtttaataaatattaaataaattcatgattatatgagtgctaataagtaataactctgttcagtgaacactggactttttcaaagagcaaacagaattagagaaaacatcagaagtataaacacatgagattttagttgccatagctgaattattcatttcaccctttcaacatatgtaataaatatacaattgtaaaaacaaccctctggaaatcagttttataaatttagtcaataagaattgctaaacattaccttgacatttgcagtggtataggtgtcaagttatagctgatcttatcttgacattgaacctttctgactaatcaagcaccctaattactttttctgaaataactactgaattcatagtcctcatctctttttacccaagagtggaaattaatcaaatgatcataaatttagtaagctatattttttgtaagaatatgtagagaaatttaatatccagtgacaagggactggttaaataagtaatatgtgaccttgatgaaacatgactagccatttaagacgaatatttataaagactgcctagctatacagaaagggcataaaatataatgtgatttggaaaaaattacaacacaaccatgaaaacatatgtagctgtggagatgggagatggggagtaaaggagactatagaaataagaaataaacaatatggtttgtggatttggggggacttttaattatgccttacatacaaattttagaaagatatatatatcctttagagagagagatatatatatcctttatatatatatctctttagatatatatatcctttatatatatatatatctttagagatatatatatctttagatatatatattctctttagatatatatatatctttagatatatatatctctttagatatatatatcttttagatatatatatatcgctttagatatatatatctctttagatatatatatatcgctttagatatatatatctctttagatatatatatatcgctttagatatatatatctctttagatatatatatatcgctttagatatatatatctctttagatatatatatatcgctttagatatatatatctctttagatatatatatccttatatatatatctttagaaagcgatgtatgtatatatatgtatatatgtatatatatatacacacccacaggatatcagttactataatctacaggagtaagtgtaaaggctttattagaatagaagctactcagatttccatgctgctgcactattgcatgccttttctattgctattgcaaattaaagcctgtttattgttcaaaagtatctctcatgtattatgattctagaagggggccttgtcttctgaagtggaagttttctttacttagaaacacattatttgacagataagtgatattagaacaacaataccagaaataagaaaatgaaacacccaagttcactcttctattaaatcaaattctttcatgtaacttttttcttcctctttcatataaatgtataatttttacagttgacactgtaatgattctttatattttttcatattacacaatttgtaagtttttatttcctgcttcataaatgtgattttaattgctgcataaaggaagcaatttttaaaagaaaaatataatgctcttgcattcttacagtgcaggaataaacctcagtgtttttcctgaccttcctttgtctgctaactgtgcactttatgatttagcatacaagactgttgtcacctgatttccatttgagtagtaacatgataatgcagagtgcaagaggaactaggttttaggtgacagacacatcatttamtatctgctttttgtttctataggggaattctggcctgggattcagtattgctggggggacagataatccccacattggagatgaccctggcatatttattacgaagattataccaggaggtgctgcagcagaggatggcagactcaggtaaagatctgaaacattagaatgattttgaaagtaaatctgctgcatcaatgagacacatttgtacctttgaagaataataattctacaaaagttctgtacttgaaagagatttttaaggcaagcttcctgaaatgactttgcagatcttttgctactgattgaatttcartagtgtttgatttgtgttcgttggtaggtaccacattgaacattgggccaggcactgtgaggaggggatgaagataaatcttttgtttggatgaggccttcagtctagttggaaagaacataaatatgaactaacgggcaaataatataattatcaaaaggatacactataagtagcattagcaagtaaagcaacgttgtagatattgtatgtattctcatattcggcaaccatttatagggctttctttaggcgtttagagagggaaaaagagtctaaaaaaaccattccctgggaaggtttcctctgagtccactaaccctacaaatctaagtgggaacacagagaaaagaacaagttgtccctcagaaaaaaagggaaagcagcttcatctggatgaagagcacaggatggcctggctcagtggctcacgcctataatcccagcactttgagaggccaaggcagatggatcacttgaggtcaggagtttgagaccagcctggccagcatagccaaaccccatctctattaaaaatacaaaaagtagctgggcatggtggtgggtacctgtaatcccagctactctggaggctgaggcaggagaatggcttgaacttgatcccagtgaactgagatcatgccactgcactcccgcctgggtgacagagtgagtccatgtctcaaaaagcaaaaaagaaaaaaaaaaaaaaaaaaaggcacatggtgagtttaggttggtggagggagtgcagccaggtacttctcagtgatagagagtagtagctgcttgagctgggctactttctttaaggaacttaattgtgggaaataagagttaccctcatggggtaaataacataaaatgctatgggatcaaaaccttagctaaaaggcactataggttggaaaaattaggagagatttttcaggaagaataacatgccctaatgtcacttttagcacccctgctaggttgtaaatcccctcaggccaagcagttacatatgtataactggctcaataaactcttgctgaagaaatgaatttttgagtaagtaaataaataaagtggagaagagggagaagtgaaaattattgtgggaggtaagataggaaggatatgtgaaatacaaaatatttatgacacttgttaatgactgtaaggaagagtttattcaagagggttcactgcaatrgagattttgcagtggaggagagttattggtcttaactctgaatacagaaagcataagtgaagatgtatagccaaagagctgtggagtggggggtggcagttagtgcatggaaaattactgagagaaaacgtcaagggtaaggggaattctggctgaagggacttggcaggattcttgttgaaggcaggccaagctgataaattatcaagggtatgggataaggaatttgatcggataccaagggagagaaatttttcataaactgactcagcaggattcttggtaaaactgggctaacgaggccaaataaaaagcctaaggtcaaagcctaattgagaataggacccagagaagcctgactcaaatttaatcaaggacggagtcttattaaataaagcaagtgaagtcctgtaggtaagaatgactttagcgtgcatggagccacattgaggactgtgacttaaggagcgaaatgtaagcttcatagcacttcctcagtctgttttttcattaagcatataagctactttgctgtttttcttatgaatcaaccaaagatacttttattccttatccagtttttctgatgtagtgattacttttgacagctgcatgtttacagcttgatgaagagaatcacatttttttttttttcaggtaaatgtgcatcttttttcaacaaaaaagatactcccacatgaaataagctttttgacaacagaatttttaagctgaattaactaaattaatttctgaatgaggacatatccccactagagtgaaaggtttgaaaaagatgctgtgtaattctatgagtcatcgtggggattctgtttgctaacactggaccctaaagaagctctrtttttaaagtttagaaatagatttgttagaggataatttagaaattatctctaaattatcattatggcgggccataatcataatttttcaccactctgtttagctacaagatggggagaacctccaccctttaaccaaattctggctctaagcttgaaatagattttatgttatatgtttatatatgtttgctctacaattaagaatgaaaagtgatatctctgagaatgccagcattctttgcctgcaaacatggtggcagccccatgcctacagaggtaaagcaaagttctgctgtgctagaaacttcattcattcgtagttgaaaagataatattgataatgaaagctaacatttcttgacattttatcatgtgcaggacattgtgctaagatacagagatgtcagatgtagacacacacacacacacacacaatcttctacttcagtagccatataagtaggtactattattgtggccataataataaggattcagaaaattaaggcttaatgattttaagatcacccagctagctttgaccacattaaaaatccagttctgaatgtcgcttaggtattctctaaaatctcatgtgttggtagaatccctacatcatgtggtctctgcctaaaaacccccaaaggtaaagctttcacaatgttaagaggtaattctgaacataacagagtttgctgtttttctattgagccacaatttccctttttttggcctctacccattggtctttattttggcttcctggagccagggccatggcctatgactgtgtatatgaatattgcctactaaggttgtacaataaacaacctgcaaaactttgtacagtgcttctaactagagcarcaaaattcaccttctccccaatccacattacagcctttgcctatgtgaagacagctaataattttcagtatttggcaggtggtctagtccaagacatacattttatagagtgggattctgcagctcagaggagtgacttatcctgaggcataaatcatttggggatcctatttaactaaaatccaaatgtcctgactcaaataattaagattattaggtagtgctaagagacagtaacaccatcgcctcaactaagtcagactaagtcttttctcagtgtgacaggaacactgaggttggaccaacaagccatgaggagtatgttttatctcaccattagtccttaaggacatgggagaaggacattgtaattagctctggaaagatgtgggttctaacttctgtatgtaacacagttgaccttggacacaagttaaactcacttaatagctattttctcatttgtaaagtggtgacaataatacctacttcactgagatgttctgaggtgagataaccgaactccttagctatggcaggcacataattggtgctcaataaattttaccaccgttttcccctttctccttaccttccctctctgtctctaagcagtttttcctctcctcttgcctctgttccttttcttctctatcccctttcctattataccttctacatttccttctgcagtctcctttcaccctgtgtgttcttccctaagtttcctgtccctatttttcacatacttttttttctcttggtcataacatggaattaaagaccatttttaaaaaataggtatggtgcaaaaaacggttctgtacttctattctcaagtttataatgtaagccactgaatctgctatgtttcctttgcttaaaaaaaacccctataaattaaacacagttttcttttatgtaaacaaatccttggtgtttcctttgagttagagacacttaaatttctttaaaatgtacctttacattataaattgctatggccttaatatttgtatcctcccaaaattcatctgttgaaagctaatccccartgtaatgatatcaggaggtggggcctttgagagatgattaggttttgaaggtggagtactcctgcatgtctctgtaaaagaagccctggcttatattagtgccctcataaaagcttccttgccccttcctttatgtgaggacatatctaaaggcattatctatgaaccaggaagagggccatcactagacatcaaatctgccagtgccttggtttataggccatttagtttatgatattttattttataatagcccaacagactaagacataaattatatttttgacagttaaataacactaacatttacagagaaactaaggtccacagaaataaggtgatgggtttgctccaaggagagtagtaaatctgaactctaaattagtggttatgtaataatcagatcaataataataatcctaataataaagaccaacacagtgcttacaatgtgccaagtcattttctggcacattagctcatttaaagtgttaaatgactcaataaaattcacactattatttattatccatttttcagataagaaaattgaggaactggtaggttaagcaacttccctaagtttgtactgctagtaaatattggagccagaatttgaatgtaagcagtttgactccagtgtccatgtttttatcttctaagctataatgcagaaaaacaacaacgacgcttaaaagacccactgttaccagcatggcacatgtatacatatgtaactaacctgcacaatgtgcacatgtaccctaaaacttaaagtataataaaaataaaaaataaaaaataaaaaaaaaaagacccactgtggtaagcatcattctaaatgccactcacgaataggcgcgatggctcatgcctgtaatcccagcactttgggaggctgaggcaggtggataacttgagatcaagagttcaaaaccagcctggccaacatggtaaaaccccatctctactaaaaatacaaaaattagcggggtgttgtggtgggcgcctgtaatcccagctactcaggaggctgaggcaggagratggcttgaaccagggaggcagaggttgcagtaagctgagatcgtaccactgcactccagcctgggcaacagagcgagaccccatctcaaaataaataaaaataaaaataaaaatgccactccccaagattctataccataatccatagaacctgtgactatgatgagatgtcactcctatgatttttatatggtataatttaccttaaaatagggagaatatacatgtgaacctggtctaattacatgagcccttaaaagtggagacttttctcaggctggtggcagaagttaaagatgtgtgatgtacttgacacgttgttgctggattgaaaatgaaggaggccatgtgagaaagaatgagaatggtctctaggagcagacagaggcccccaggctgacagccaacaatgaagcagggacctcagtcccacaaactcaaggaactgaattctgacacaaccacatgagctcggaagaagaccctgaaccttgagatgagaatgcagctcagctgacatcttgatacagccttgtgagaacttaagcagagattctggcctcgctgtgctagacttatgacatacaccaatagtgagctaataaatagaaatagtttcaagttggtaagtgtgtaagtgtgtggtaattttctttctttctttctttctttttttttttttttttgacggagactcactctgtcgcccaggctggagtgcagtggcgcaatctcggctcactgccacctccgccttctgggttcaagcgattcttctgcctcagcctcttgagtagctgggactgcaggtgcccgccaccacacccagctaatttttgtatttttagtagaatcagggtttcaccatgttggccaggcttgtctcgaactcctgaccttgtgatccgcccacctcagcctcccaaagtgctgggattacaggtgtgagccaccgtacccagccggtttgtggtaattttctaggaaacaattctaggaaccctggaatcattatgaaaaaccttcctgtgtgtgcgaaatcatagccaatataaagtgacagtgcagactaaaggcacagataaagtgagaagtgacttcctccctaagtagaccagacttcaaatcaagctccagtcttagttgttctttctcctgaaagaacaacttctcataaaagagatataggagaaagaacacaatatttggagtcaaagaccaaggtttcaggtactacttcctagctatgtgactttgggcccctttttaagctctatgttcttcagtttcctcactggtacattggagataggaacatatatctcaagaagatatagtaagattacatgaaatagtgtttgtaaaggagttatgtaaaaggcaaggcctgcaatacaactctgttatctatagagccagctatttagcagaatgctgaacctcagccacaagtctgtggcagccagggatggacagtgtggtaggcaaaattctaagatgccccctaataacctacatccctttccttcgaatgtggacaggacctgtgaatatgatcagattcaattccatgattatgctactttatatggcaaaagggacttcacagatgtaattaagtcccctaatcatttgactttgatttaatcaaaatggagattatcctgattcagactgacccatgtaatgagacttttaaaaacagagagattctcttactggcatggatgaagcaaacttccatgttgttaaagaacctatggggggctgtgtagtaaggacctgaaggcatcctttacgtactaagtaagtccccaggctacagctagcaagatagaagacatcagacatacagtcacaaggaattgatttctgcagattgctacatgagcttataagagaaccccaagttcccaaaatgaatacagtccagctgacacatcagtgcatgcagcctcgtgataccaaagtagaggactcctctgagtcacgtctagattcctgacctgctgaaattctgagataataagtatatgttgtcttaaactgattaatttgtggtaaattgtcatgtaacaamaagaaactaatatagacatataaattctggaccctaaaattcccttaaactgggctgcagagtagcttgctgttgcaggtctccggtaatactgtcacacccaaaacttcagaaacactgatcaggcctcatgattggacttgggactttctaatacctaaaggcaagaggccaaagcacaatcaatcaaaagcaagaggtggacccacgcyagtaaaagggaggaatctagtccctcgggtggagggacagcagagatggagactgagacctgttttccctctactggctggagatgtgaatctgagctggagtgagggagacagccagaaactgcagggaaaatgtgagatgagggctaagtcaagaggcaaggcaagaagagcacatggcggtttagatgaatttctctgaacagtgaccattttctgatagaacttctttttaaatagaacttttcgggtatgtgtgtttatggccgtgatatttgtcctttgtgtaataaatataaaataaagaagagtagacaaagactaagcaaaacacagcactttcatttttgcactacacaaagctaatcactagtaacatttttgtacatgtctttctgatattttttgccttttaaacttagtttagatcatactctatatgatatttaatttttgtttaacttcgcttaaccttagttcagagacctttccctgtatcaataaaaaagcctttgcaaataatttaattgctataaagtagcatatttagccattcacattgtttggaatttattttcagtttatgagcattttaaatatatggacatcttttggaaaacattattaaccttgtacctcattatttccttagtatatatttctactatagaatttctgaacctgatagaatgaacattttaaaaccttttgatgcatgttaccaaatttctttccagaaatattctaccaaattttacttttaccaacaatgttggagaggtcctactttgcaatatgttgtcagtgttgcatgtggtttcacatatgtaattttggcatacacgtatgtccaaggcaaacaatggtatatttccctgctttgctttgcatttacttgattaagagtaagatgaaacttttaaaaaatgttactcgtcatttgtgttttgtcttctagagtagtcattaaaatttgatagcattatctatcttttttttttttttttttttttgagatgaaatctcactcttgtcacccaggctggagtgcaatggtgcgatcttggctcactgcaacctccgcctcctgggttcaagcgattctcctgcctcagcctcgtgagtagctgggattacaggcgcctgctaccacgcccagctaatttttgcatttttagtagagacggggtttcaccatgttggccaggctggtcttgaactcctgacctcaggcaatctacctgcctcggcctcccaaagtgctaggattacaggcgtgagccaccgcgcctggccagcgttacctatctttaagcagtatttgaaaagaacattaggttttctttcagagcaaaatagatatacatccatgatatgaagaatgatttttatttcttcacttgtatttgaattataaaaatgccctctgtgtagtttgaagtcctagaattgccagggaccaatattgatatgtcatcatkgggaagagctatcacatgacagcctccacttggcaatgcagcaatgacattttacacaagagtgcgtttattaaaggcatccacagcacaaaagcaccatgtagaaacaggcagaaaagatggctgcttgccaatttcctgacaagtgacacaatttaatctcttagccttcagcataatcatttctactcccagacaagatataaaaaaaaagaagttttcttttctttaaatccattgcttcatttattacttctgtgtctgtttacaggtaaggttgtctttgtcctcataaaaaccaagacaacatacatgtttatttcaaacaagaataatgattatactgaggtttgactgtactgacaaagttgagaggtcaaggacgaatgtttcaagaatgcagttcttgtgtataaacaacaacgttgtcctttggctgtcctttgtcaattcatttttttgctttttcattaatgtatatccactaactcagtgatgattttaaaataagaacacgatgagaaagacagaaggggaggggaggaaaaggaaacacagagaggggaggaaaagaaggaagaaaaatgattggtaatcatcacgagatgaaggcttagaaatggaaaagataaagctcagcttggtttttttgtttgttttttgttttctgtgcaaatgagaagcaccaaacagaggaaagggagtaacttccaggcatcacagtctgacacttattcccaagacccacttaccaattgtttaagaaaatgaaagatttctaggaagtggaaatagcataagagattgctaaattcttagagtacctctccatactgaactgtcatgagtttgggtgattgcaaataaaaaaaccccacaagtcacaacatccaacctgtcaatttccactgtaccccaactgattgttgcactaaatgactatgatcatggtaaatgttttattcaaaggcagagacttctagtgcttccaaatccaagtaaacatttatttcatcattgttttgggggtcaaagcaggatacaagcccagctgttgctctgaacaggaagaccttcatgagaagggagactttattacctagtataaatgataccagcgctctctttagaaagatgtatgatgcaaatctcaatggactcattcttaaggattattttttccatctctcccaacaaaagtgaaaagtattgaagggtaacaaccctctcttttgattttctctgtccataatatcagccctaattgtatttatagagtacttggacaagaagaaaatcacctagcaagtggttctgtggtgactggcaatcgacaagtccccaacaatttagtattatgttacacaagaaaatttctatacaagaagaataatttcagctgcacatctggtagaacatcaggcacccacaagtagtctttcgcagctggagttttcctatttctgtcaactgccatatattccaataaaggaaatccacctatgagttgaccgaaatattaataactttgtggcaaacatgactcgttggatttttgtttttttttttttctctagcaaattctatcaagacttctggatatatacctgcataagaatgtaattggctcccatctcacactgtagacaaatattaattaaatgggatcatagacctacatgtaagaactagaactataaaagtcttagaagaaaatgtaggagtaaatctttatgatcttggtttaggaagtggtttctttatatgacacaaaaagcatgagcaacaaagaaaaaatagataacttggagttcgtcaattaaaaactttgtgctttcaaaggacactatcaagaagttaaaagataacccacataatgagagaaaatacttgcaaataatatacctgataaacgacttgtatccggaatgtgtaataaaactcctacaactcaacaataagaagataacccaatttaaaaatgatcaatcatttcgtattattttctattgctgctgtaacacattactacaaacttagtgacttaaaataatgcgaatttattatcctatagttctggacgtcagaagtccaaaatcagactcactgagataaacttggaatgttgacaggggaaccccagagactatatgggataatttgtttcttttccttttcccaacttcaraaggccatctgaatcacttggctcataacccttttctccatccaacctttacttccatcatcctatctcttcattgactatgactctactaactcttctttataaggactcctgtgattatattggacaccccaggataatccaagaaagtcacctcatctcaagatccttaactgaattacatctgaaaggtcttttgtgccatataaagtaacatattcacaggttccaggcattgggacataaatttcttgaggtgaggggcattattcagcctaccacaaatttgaatatatatttattcarataagatatgyaaatggccaatgagcacataaaaagatgtccagcatcattattcattggtgaacagcaaatcaaaagtacagggagataccactttatacccacaagaatggytataataaaaaagatggacagtataagtgttggcaaggatgtagagaatcagaaccctcagcatgcctggtgggattgtaaaatggtgcagctactttagaaaacagtctggcagtccatctaacagctaaaaatagaattgccacacgaccagtcattctactcctagcatatacccaagagaactgaaaacatatgtctacacaaaaacttgtacactaaggttcatagcaccattatgcataacagccaaaaactggaaacaacccaaatgtccattgatgggtgaatggataaattgtgttatattcaaaaatgggatactattagctgaaaaaggaataaagtactgacagatggcacaacattaatgaaacttgaaaacatgctaagtgaaagaagccagacaaaaaaggccacatattatacaattttatttacacgaaatttctagaatagggaaatccatgcaaatagaaggtagattagtggttgccaggggctagtaatagatataagatttcttttgggggtgatgaaaatgttctaggctgggcaccatgacttatgtctgtagtcccagcaccttgggaggctaaggcgggcagattgcttgagcacaggagttggaggccagcctctacaacatggtgaaacctcatctctgcaaaaaatacaaaaattagccaggtgtggtggtgcatgcctgtagcctcagctacttgggaggctaaggtgggaggatcgcttgagcccaggaggttaagkctgcagtgagccatgattgcactactacactccagtcagggtggcagagcaacaccttgtctcaaaaaaaaaaaaaaagaaagaaagaaaaagaaaaaacagaaagaaagaaaatgtttaaaattacatagggcaattggacaactctgtgactgtactaaaaaaacactgaattatgcactttaaaagggcaaattttaaagtatgtgaattatatctcaataaagatattactttaaaagtgccctgtcattctttttgggcataaatatccccatttacaaatctaagaaatttttttcctagtttcagaaagctcacaacttcttcatattgttgttcatttaaagatacaatttatttaaagtttttgaattcattcaccaagttcttgaatctgttaaagaagrtctttgatttgttcttaaatctaaccaagtagagagtaccatttgtttggggctccatgtctgtatggtgtaagtaatctttaaacaagcaaatatcacaaggtgctcacattttctaaacaggtatttgaccctgtattccagctgctaaaacatcaacattgtataaaaattatctgataaatagcatttctgttttcaaaagtcaaaaccaaattattgatatgctttacaatttaggggattaattcaggttgtgttttataaggtccaattttccaaatataatcaagaaaagaaagaatgatatattgattcctcacagaggaacaacaggattgctgagacatagatgtgatgattcatatcccttaagattggctttatgggattctaaatattctgatttaagcatcgccactgctttgtgtatagggtgcaatttctggaattatttgtaggtttatatctaaacttccagcccagactaaaagttaacaagatgtactgctctagtgaaggcaagagacataggaatctctgccactaactagctatgagtcctatacaggatcttggggaattttccattttaaaatcatattctaattatctgacatttgttgacagcctgagaagttcagaatgctattatcatggccaggaaatcaatgctttgtttcagttaaactcagagctctgagaagatccactgctcattagattcatataccaaagagctgattgcagctttaagtggtgataaggcatttgtttttatttatttctaatagtctctccagacacatgttgtcattctaacattctgaaaccaaattttatattgattttagcaaatagctctttgggctctagacaaaagaaaatggtttgagggaggtagaaaaatatatttaaattatttgctgaaattgaattcaatggtaatcttaaatattttcaagaattggtttttctgagcagtttataaattgtgtcattatttagaaaggtctaataatgtggtaagctttgcacargcatcaagccacttcaaattagcttaacaattaaatgmccaaatcataaagatgttagagctactgtcacagaaaatcaaagctgggcagtagttaaattggtagaaacagattttattcagggactgttgcagtagaggaaaagagacctcwctataaaaataagctcaatttcagatacaatatgaacaaatggggatttacagccaaggagcagggtggagatcagtggacagaaaattactaggaggaaacatcaagagtaagggggcattcttgatcaattgaacttactgwaagtgggccagagtgatcagatatcaatggtgagggattctctttaaactatatcccagaaaatgtacaatcattatgtatcaatagaataaattaacaaaaaaggtaagttaacagaattcctactaaaactgagaagtacaggcctgagaaggacagacactgaaacccaaggtcaaagcccagttgagaagagagcttagaggagcctgactaaagtttggtcaaggagagaatctttgtcactacttaatattcattgagcttataaaatggtaagcaccaggcccacccagacattttcagaaactgtggcaacagtagaacaaaatcttgcatatcttctgagagcggtttctcccataccacccattctgagccaggcaacctttattcacaaaatacccttccctctcccccaccactatccctacttccattccaaaggaacacattacattttggtttctcagaggaagctaacgctggaaaaccaagttagaatataaactttttagaattctcaaatttctacaccaggaaattccagcacagcgacagcagtccccagcccccagtttatgcatttcgttttctakccccagctccttcttacctcatgagagccctgagtgcatgcctacaatactacaacttgtacacctaaactccacctactttttcttcaaatagttgccctttggtcacttttgagcctagggttattcataaagctggcactgtcaacccttagaggtatgaastgtggagaaaggttcacatatctactggagtgaactgcggccctctggtcaaggaattcctgattatgtctgttggggtgaatgagagtaaagcctctctgggatcttgtagactttccatgaagtgatcacttaaatgctaactatatttatttagttttaaggcacagtaaaaataaaataaataggtattctctttctgttactatataacagaaataaataaaataaatagatattcatttttggttactgtaacaggatactacagactgggtaatttataaagaaaagaagtttcttaggctcatggttctggaggctggcaagtccaagagcatggtaccagcatctgacaaaggccatcccttggtgaaagggcagggcagaagcaggatcaagtacacaatacagagagagatactataggccagacttgctttataaccaccttctctctaaataactaaccactgtcatgataatattaatccatttatgaggactctgcccgaatgacccaatcacctgttattaggccygacctcccaacactgttgcattgggaattaaatttccaacacatgaacttttgggggacacattcaaacaataagactgtgactggtagagttcttggcttttagtttctcatattaggttttgtggtggtagttgtggctttcatcccagattaatagagcaatctttcctttgtcttaatgataccacatttatttacattagatgactgttattttctttcttttttattttccaagatggagtcttgctctgttgcccaggctggagtgcagtggcatgatctcagctcactggaatctccacctcctgggttcaagcgattctcctgcctcagcctcccgagtagctgggattamaggtgcctgccaccatgcccagctaatttttgtattttcaatagagatggggttttaccatgttagccaggctggtcttgaactcctgacctcaggtgatctacccgccttggcctccaaaagtgctgggattacaggtgtgagccaccatacccagcaactgacttagttattttcttgatagctaaatctgaagagaagaaacatggcaatctctaagtctccttaatataccaccattctatatgtcttctatcccatgttattcatttactattctattttctataacatctagcatgtctctcaccmacagcagacacttagaactaatgatagctaccattcattaaatttttttccagaagcctatggaggtgtaaagaggttcagttatttacaggtgtctgagacaaaattcatactcagtctgtttgactccaaaatccatattcttctcactacagcacatggctgcaattgcaattatctgcagataaataactgaacatatatttaagaatctatgaacacaaagccctgccaacatctcatgtcatagtattaaaaattaaaagcacaaatacatcaaagtgacacccatattcttttagctcttcaggaaatgactgatcagtgtggattggtgttttagtcacttcacaaacccatctaaaaagatagtgaaaaagattaagtaatcttgtttttgaagataatgtatttctctgattataaagtaatggatgtacctcatagaaaatttgaaaaatacggacatttcaaagtaaattagaatcattcacaaccttatcactaaaagcctctatttattatactccttcatattcagtgcatattttcaaacagttgaacttttatcctgcctttttcatttaataccataacacaggcattgtactttaaaaatattttgtaaattttggcttgtagagtttctgccagaatttacaaagtattttaaaataaaatgactgtgttatggtattaaatgaaaaaggcaggatgaaagttcaagacatttatgcagccaacagacacatgaaaaaatgctcatcatcactggtcatcagagaaatgcaaatcaaaaccacagtgagataccatctcacaccagttagaaaggagatcattaaaaagtcaggaaacaacaggtgctggagagcatatggagaaataggaaagcttttacatacactgttggtggcagtgtaaactagttcaaccattgtggaagacaatgtggtgattcctcagggaactagaactagaaataccatttgacccagcgatcccrttactgggtatatacccaaaggattataaatcatgctactataaagacacatgcacacgtatgtttattgcggcactattcacaatagcaaagacttggaagcaacccaaatgtccatcagtgatagactggattaagaaaatgtggcaaatacacaccatggaatactatgcagctacataaaaggatgagttcatgtcctttgtagggacatggatgaaaccatctttctgagcaaactatcacaaggacacaaaaccaaacaccatatgttctcactcataggagggaatttaacaatgagaacacttggacacagtgtggggatttgttgttacttacatatttctgggtttgaaattaactggctccagtattccttgttacttttttttttcttttttctttgtaaattatagacctgaagtattttttaacatttgtctgattgaattaataataatagtgtttattaattaaaaccagcttctggagaggttgtaacactcaatatcagtattattctaacattttgagctaagacaatgtataaatcatccttcgcacagtgacctagaattggcctgtgaagactcatgttacctgaatttggcccaaatcatttttgattatgcaaatgtgcctgttatttacaacacagacatcagagccacaagatataatccacaatatactgctaataattaaagtgttggtataattttccgtcttctcctatcgtttgttaactcctttaaatattatagtctgatttagttgtaaattaacagaggaatgtagaccatttgaaaaaaaagaagcaaaaatgccttttttttttttttgagacagagttttgctcttgtcgtgcaggttggagtgcaatggtgcgatctcggctcactgcaacctctgcctcgtgggttcaagtgagtctcctgcctcagcctcctgagaagctgggattacaggtgtccgccaccacgcccagctaatttttgtgtttttagtagagatggggtttcaccttgttggccaggctggtctggaactccagacctcaggtgatccacccacctcagcttcccaaaggkctgggattttayrtgtaagccactgtgcccagcccaaagcaatgctttctttcagaaaacaatgaattgaaaaatgaattattagctgtttcccctgtttatctgcatgttgaataaaattattaaaacacaatctatttgatagtcattagtccaggtatacataataatatacatcatcataataataatgtaacatgtattttagacctttgttcaaaagcatcccataatgattgattgtgccttatgtgagagtatgctttatgtgccataaactcatcacctctgcattctcacttctctagcattcagagtgcagcatcaaacttgcaaacctgacttrgaaaagaatatgagctatgtcactgttttgtatgtggggagtgagggaaggtagtttcagggttttcattgtggtgagatagatcttgagtaagctgattcactgtcattgggaaattaagtgatataataagcataagggataaaacaagtgtttattaaactgacacagaatattttattttactcccaaactgttgttatttattggccctataaatatttcttgagtattctgttgtgcttcagacatctggagctgggaatagagaagggaacaagaaaatcaggatctttgccaccatggacctctcaacccaacacggtaatcaacctaagttgagagttaaaaggagttctatgaatgtaaaggacgtagtgctgtgaaaggctgtaatggcatgacctaatctagcctaagatactcaggggaagccttgtagagagttaatatttaagctgagacataaagggtaactgttacccaagtgaatrgagctggaggagtcttcaggcagagaatgcatgcccaaaggcctgaggaggaatagggaaggtgactggaggtggtgggagagtgcagactggcacaaggtgaaggtggagaggtggccatgagaaatcagggagagagagccttgggtgctatagtaagtaatttattctttatccttttgaaagaacatgagacctggaatgtttcaatgtgggaaatgacaaaactaaattgttatctataaaaatcactctgccatggaagtctggcttagctgataagagtgcctgcagttatagcagtctaagaagctgttgtagggctggacacggtggctcatgcctgtaatcccaacactttgggaggctgaggtgggtggatcacctgaggtcagaagttcaagaccagcctagccaaaatggagaaacccccatctactaaaaatacaaaaattagctgggcatggcagcaggtgcctataatcccagctacttgggaggctgaagcatgagaattgctggaacccaggaggcagaggttgcagtgagccaagattgtgccactgcactccagcctgggtgacagagcaagactccatctcaaaaagaaaaacaaaaaaaaaaaacaaaccaaaaatagaagctattatagtaattcagctaatgaaagattgtaacttgaactaaggtgttggcaaaaagattgagagaaatagacatattttgaaatatactggggataaactttataaatcttaatgattaattggaatgggatgcaaagggaagtggtattccttcaaataaatcatctgtgtcctctttgtcctgggccccatatcaggtgctgagtatataatacccttgttttcaaagagttcaccatctaatagaattattaaagaatgactttgaggatgacaattggaaaggaatggtggagaggtaaagttggaaaatatgttgaatagttccattttggacaatgttaatttaagatgcctacaacaaaagcaaatggagatatcaaataggcagttgaacgtggatatggaactctgagagatctgactgggaatgtcattgggaacctttaaaaccaagtgaattaagagattgccttgaaaaagtatggaataaaaagaaaagagaagctaggacttagtcctgagatatttcagacttttaatgtaggttagagcagagctttctaaattgagtaaggtgtacctctaggagtacataggtggatttatgtcacttaatatccagatcttcaattgacctgcccaagaagaagcctgcagctttatgatggttcttctttttcacttttccatttaattggtattttcacatttaaaaaaataaagtatatgtcttaaccgtcctaaattctgctatgattcattgtcctagatataaagaaacaatctgaaatactgttgcctggcatgagaaagtcggtgactctaatgattaggtaactaatcattttgttaaatcatgtggtttccaattctttgcttttaataaaattgaaaagcaacagtcaactgatagattattaaagtaattttaattataggtcacaggattcagagcatataacttggaaggaattcagttttcttcccattcccatctacctgtttatatgaacaagatttctgatcacttacatatacagaaatgaaaaaaggaattctgaatcttgtcttactcttaactttaattcatattaatctatggaaacatggactgattttgaaaaacactactcaatctactaagaaaagaatccccaatacaatttcatctttattgttttaggtttatatgttgaatttcataatatattttagtgattttgataaattgcataacactaataatcataaaacccagtctagaaaattatttttattgtttggaatcttatggtcacagaaaatttgagggaaaaatcatcagatttatatttgtacatgtgtttttgttttatataagtatgctagggtgatcaatagaaaatgttctaacatagtgatatattgaagtaaaacttcccatggtaaaagtagaatggaaacataagttcaaggagaaagaaaagtgtgattttttaactgctcaagaagatattgtttattaatattttaaattgtgagcgtggacttcaaatcagtatgtacttatatcccatgggatacatttgaaatagtgatgtaattgtgaaaaaaataaaattttacaattcacagtaggtcagaaatgatatcctttgctactatttaaatttataacaattgtcagcctaaaacatgcaaaaatagcacatagttgtttttgttttccttgtttttgttttttaagtatgaagattaataggttgaggaagaattaaaatagagatgtacaaaaggaatggccagcatggtcagaagaaaagcaggagaggcacagaatgcagaagagtgtttcaaggaaggaatgagccactgggcttcccactgttgtgagatggaccaaaatgagaactaacgagatctcattagatttggcaaaatcaagattactggtgaatttagtaggaccatttctctttttcttggtaggggctttgtgaggaaactcagactagaatgagataaagagagtttgggaaggaagaagtagaaaatagagagagtgtgtataaacagatcttctgataagcttgactggtaaagaggaaggagataggacagtagccaaggggagatgccaggtcaagacaacattttaaaaactaagagatactagaacatgtttgaatattcagagatgacttaagtagaggctgggtttgaagatgcagaatatagagagattaaatgatctggtgagatctttaaaaagacatgaattgatggacttttggtatcagagggaacacttgctccactgtaataggaatagaaaggagacggtgggtttgcatgcagtaaagtatagaaatctggcataataatttgagagacttcacatcacatggctttgtttttctcttggaattattagcaaacatattttctggaagtgatgcaggaaaggagaacattggagtttatctttttagaaagagggacagcaagctgagcagggcgaagtgtggtgttacatttggagatcatagtgacttccatcatttgaggattttctccactaacttctggaaggggcagtgaagaaggtggagggttgggttcagtcagggttggggttttgccagacaactgcaacagaaggactagtgacaatagcatagataggagttataagtgggaagtgaacaagaccagaagccattagactaatttttatttctgttatctgctgtgtgaatttgagtaagttgcttaacttatcaaatcctcaggtttttttcacttgaaaatgtagcaataatcgcgtggcgtaggtcttgattttaacaatgaaacagaagatattgttgaagtgttttgtaaatagtgagcgctagatagacagaagttattaccagagcctmctgcagctgttgtcacaggtgtcctaggaagatgtgtgatttcatgtttggctttctgtctgatctcctttctcttctggagaagcttctctcttctgcttccctcatgcctatggcctcctttaatatgttccttcatgtaagtgtccctcatagactcacctagtctaccatgcttcaaactgaagtcatacagtctacataaagttataaatcaaatatgaatgactgacaccagtgggtttctttgtgtttcaaaaggaaaaattgatgaattcaaatgaaaccaggtttctggaaagcaagaatatatttgtgagcaaaggggcccttcttgttgcccttaatcctttatgccaccatcctcaggctctgagttttgcctccacaaatgagaacaagtgtaatagattaagcataccatttgcaaataccagttcaaccattaagtcagggagttccggctctggttttatgaaatcataaaatgtcaccaataatctcaaaatgtgtcatgagtttttcatcacaaattaatttgaatttatttcatgaaatatgatttaccctaggaagagatgaggagtataagtactgtgaaattacataaacagtaatagctgattattgtagctcaggaaaggtcagaaaacagcatcactaatcatctaccctagaaaattagcacctccaggcaatctagcattatctgttgcatagagaattgctcacaacctttggcagtactaaataattccaataattataggtataaatttaagaagttcttcaagctagagctatcagaattcaaatttgggcagcaaaattgcatrtattttattactgaccaacccaatcttaactaggaagaactattattcattcactcattccttcattgaataattcattttttattcaactctttgcttagtgcctgttaggagctcagcactgtcctaggcattaatgataaaatggtcaaccagacagacaaggctcctactctaagaaaggtgggcagaagataaacaaatatacaaatatattttctgtctgttggacagaaaataaacaactatacaaaatatcatatggtaataaaygctatgcagaaaatgaagcagagtgatatagtgatgaatgcctggtggcaactttagattaaataatcaagttaggcctttctgaggaggtgatatttaaggtaagatcttaatgacaaataggagctagccaaaaacatgagggaaaagactttcaaagctggggaaacaataagtacaagtaccctaaggcaggagtgagctaggtatgtagggcacaatggtagacgatgctaggagacagagctaggggacagtggtagaagatgagagcacaagaataaataggagctcaaactttgtaaggcaggtaagggctttgggttttaatttaaattacataggaagagctcgtaggtcttaagtaagggatgattgatattatctgatttaaatttaaaaattagaaactgtgggccgggcgcggtggctcaagcctgtaatcccaacactttgggaggccgaggtgggcagatcacgaggtcaggagatcgagaccatcctggctaacatggtgaaaccccgtctgtactaaaaatacaaaaaattagccgggcgtggtggccggcgcctatagtcccagctacttgggaggctgaggcaggagaatggcgtgaacccgggaggcggaggttgcagtgagccgagatcacgccactgcactccagcctgggcgacagagcaagactcyacctcaaaaaaaaaaaaaaaaattagaaactctggtttccgtctagagaatatattaaagaaaacaggagtggaacccgtgagccaacatgtttgggtagaagtggttggtagtggcttgggcaagggtgatagtcgtagagatggagaaaagttgatggactgggatagatattgtagctagaagctactgatcttgttaatggattggatgtagagggtgaaggaaattaaaaatcttgttaatggattggatgtagagggtgaaggaaataaaagataacaaaaaaactgaatgtatgatggtgtcttttgtgaggagttgagctggccactggtgatggaaaattagaggcaagatttcttctgtcatagggcttatattctagtgcagggaaatataataaataagaaaacaaataaatttaagtaatacaagtatctcatttgttgttgaactatacaaatgctgaaaattacttccctgtaacaggtaatgagatttgatattctctataacaacatgagatttgatatttacaagaattttaaaagatgccaaatgttttctcttaaatattttatacatctcataaactgctgcaattacatacaatgaaattatatgtattttccctgcgtacgtatatgttggttggcttttaagatgctccacacttcctggaggttgggtggggggcttatgacacacctgttatagtcatggtaaatgaagaacagttcaaaataagaagcaacattacagtttgccacatggtatacttgagttcagacttacggtttaattttcctgtttctatggaaattaagctctgagaattaaaataatcatgagaataataaacaagaactttaatttaaagcctaaccgctaaagtttaaaagatgtgcttaagtagaactagctttgtatgtaagtgacataagcttctgaccctgtgatgtgaatttgtaaatccccacctcttcatcccctaggtcaagggccagtatctttctcgttggcaactgtgtcctcagtgcctatacaatacctggtactctgtggcaggtcttcaatatatgttggttgaatgtatgtatgtgcggattacatatatctctcaacttatatttgaggtcttattattggtgatcaattgtgtttgtttaggccttgccctatcactggagttctttttttttttcttaatgctaatatgcctatgaatgatagcttgtttgttagggtgattaaatttgaattcattctttttataccaggaggaaagagatgagatgagaagacagcattcttatgggacaaagtcactggaaaggatgaggaaaaggtgtggatactggcagcaaagatgtcattgactaacttccccacttataaaattcattcactctatttgccaaatatatattctgtgccaactctgttctaccctgtgaggcactaaaaatacaaaaatgaatgacaaatgattttatccctcaagtcataaaccacaaatcaaaacttatgatttataagtgaagacagacatttaaacaaaacattttcttcctttcctcactacccacatacaatccatcagcacatctattagattctaatcagccctccatgtctgtccccttctctttatcctgactgccactggcttagtgcaggctattatatcttttatcagggttatatagcagcctctaacaacaattcttgctttcttctaccttaactccacctaccaaatctaatcaagtccacatctccacattgtacctggagaattattctaaaacattattctagctataagcagtacaatggctttccagtgcctttaagttcaagtccaaattatttaacatgtcgtaccaagaccttcaagacttgatctgtgctccttacctcatcagccactaaactgtgcctgaaacacttcttcctatctttattcacttggctaacttctatttggccttcaggtctcagctgcctcagttgctccaagttttccttggcccccaaaaaccaaataaggttctcctgttatgtactcctgcattaccctgtatttctcttgccatagcacttatattgaattttaatagcatttttcctatctctcttgctaaactgtgaagctacttcaggatatgcatttgtctttaaaggtacttaacagacaaccsgggtctggaggtggctaattcaggcagaggaagaggcctgaccaatgaacttgcataatgtttgaagaaactacttatatagcaagagacagggctggggaagtgaatagcaatcagattgtggaaagacttgggtgttatgtgaaggtactttggctttatccaaaaaggcaggtggattcaatttatgttccacagaaccctgtgatcagtgctaccagtagctcataagaagtttttatgtgaattagaaaactcataagaagcttttatgtgcattagacactcccttcagcagagacagctcagtgccaaggcacttggcttagagaaagggttttgcctggatttctttctgcactcactagcttctgctcagtcatatatagcaccctgactggattcctcagagccctctgaagggtcacgaatgaggcagcaggctcggctctgattctcttttcctctatgctgcagaaatcacagaaattctccctctatttgttatatataaataattataaatatccattgtgtgacttctaagtaagatttcattttaataaagggcttctttgcttggattttttaaatgtagacaatggagagcaattgaggaccattaaatatgggataaaacattcaggcttatatttcaataacaccattctggcaataagttggaagatggaatagaggggaaaaagctggaggcaagaagactagttacaacttttttccccagaatctaggtgattgacaataagggctagaattaggtagaataaatgagagtaaaagaaaaggatatactcaggaggctgaggcaggaggataattgagcccaggagttcaaggctgcgctgagctatgatcctgccactgaacttcaacctgggccacagagcaagacccccatctttaaaaataaaaaggttcaggccaggcatggtagctcgcgcctgtaatcccagcactttgggaggctgaggtgggtggatcacttgagctcaggagtttgtgaccagcctgggcaacatggcaaaaccccatctctacaagaaatacaaaaaataaaaataaaaaaaaagccagtgtgatggtgtgcactcgtagttccaaccacatgggaggctgaggtaggaggcagcttgagcctggaaggcagaggtttcagtgcgtcgtgattgtgccactgcactacagctggggcaacagaatgagacccttctcaaaaacaataaataaatacaaagtaattaattaactaaaaatgaaaaattttaaaataaaaatatgttaaaatgtgatagattggatgtgtggctaaaaaagaaggaacactcctccctttctggtgatgaaattatttgtcttgatggagaattaaaagtgaagtaaagggttgtctatggggaagagataagattaatttcagactctgctccatttgagatgtactgtcaacttccaagtaaagataggtgccaggctgggttgaccttgaatttaggtttatagaacaccagagctagaagagaattttaagatcactgtactcaaacacacagagaaaaaaaattgacttgaactggaaagtggcagaaacccaggattagaattcatatctagcttataacccagtgttcttcccaccatgccatgctccttgttgttctcaacttttcactgaaatgttcatcaatttaatgccaaattgaacttgactgagaaaatgtacaattatgaattccatatatgttgatctacatctatttctgggattggagtagatttgagtagaggaaaataggaaatcaaatccagcattgttaaatgtatttcttaatgtgtagtactcactattttaggttctatgcaggtaacaaataaatctatagcttcttgatgagaatctgccatgtatttgcaattgggacattatggacaataaagccttgagtgatttggaaacatttcatgggctatggagtgtgaacttgcctttgaatgatgctagctttggttgaacgtttgagagacagaaagcaacatgaaacaaaatatagtgtcctggctggagcaggcagtaagaggtataaaaagggggttggtttagaagtcatacaatgatgctaattttttcttatgtgacaactgtgtacctgacactggtaatacaaagattaaccacagttttaattttatatatgttacaaatctcttgaatttagaggggaaatgaaatgataaaagggttgccttaggaagttgaacctggttttgtgtgtttgaatgaaatggagaggggctaattagcctggcatcaggaaaactagctaggaagctactgtagtaatccaggtggtaggtaccagcacctcatctcttgaaagttgacaagcagtcctgtcagtggacacagtattgaactgagcgggctaagtaatctccagtcccatgaccctctcactttggaatttctattcaatgtctcttttccatgttgtacccattaagtagcctagcttgaaatttgttactggcctctgcttttccaggaaagtgccaaaagaccaatcactgatgctgaaatagcaatttctgtccccattgtggaaagctgtgatgcttcccagatgacagctgcagagagtcctgcaagcattttatagaagggaaatgaagtggcaaatagaggggaaaaacagtacattcactgtaggagatggcttctatggatcataaacccgagttactctcattcagagttagagacgagagcagaagccctattttttaaatgtggaatgaagaggctatcagttggtcttagctgaaggaagggagtcagtaaaagagtttcaggtagaaaatgagtgctggaaaatggtttgcatgtccacagccttacacattatggcagctgtggtctcctggtccaggttcccttagaggctttgttccaaataatgaaaagctgcaaatagaggggttgggtttggagtcagagctcaggacttttatcacatactcagttgggtctacataagattgagtatttctgtttattttggaatgaatcatacatgagccaagtagaatgacccttcaaaacctagagcagtggtttttggagtatggtctcagtccagcattaccaggatcacctaggaacgtgttagaaatgtgactcttctctcctgctctagacctactgaatcagcacctctggagggggaagctcagtggtaatgtatagtttaacaagccctccccaaagtgtgagaaagattgatctagattttgttacttggcttggctctactggtttacagtatggtcctggacccgactgacagtgggtccttaagtaagtcgcaaaatcatttttaacaaaccagagaagtgtagatggtatagggcatgaactttgagatttcctagacatcatttacctgtcattacaaacctatttcaactttagtttctactgtggaatgaaggcgacaatatctacttttcagtgtttctatttacattaaagactatataacatagtatataatacaaacttttcccactaggtgccaggcattaatgctattcgaataaaacaaataaactcagtataatgagtgcttttataaatactgtatttttataaatttgaattcctagttaaattttaatttcaatggaacatacttatactaaaatgtatgtgtttatctaaataataattactaatgtttatctgaaattgaaattcaactgattgtcctgtatttttatttgctgtattaatatttttcactaagtacctaatggaggaacactggagcaaataactgggccaaagatggcatcctagaagatgagataagcttgaattaagttttaaaagggaaaaaggaatgagctaagggagataacacatgtaaagtaytggtcacaaagtctgcctgtattaatcagaaatatttgttggcaagtaaaagacccaccagcttacttactcaaaagggagaattaattagaaggacatttgaagtatcttctcaaactggacaattaagcgctgggaagaatagccatggactgagacactgtcaggtgttagaggaattcctccttctgtccgaagcccatacttcttcctatagatctactttattccccatctttttggagatagtcttttgaaattttatagtcaacatggaagaaaatggcctctaatattaagctctcaagtttctatttcttctggtcacatagaacctctgagtctcatggtttcaattccacattcccaaaagcaggactggccagacttgacaagtgaaccaggttaagccatataagcttgtcactcctcctacaaccatgtggatgtttgctggaaaaaaaagcctcatagatattactacattggcccatatcagatgcctctaaaacattcctcttcctttcttggaaaaatgctaaattatgctgatttttattcttttattttttatttttaataaactaataatgcctaatgaggtcagtgaaatatacagatcattagggtgagaagtttcaacaagggagaaccttaactggtgatggactttaaagatccccagtaacacttccatgtacttcataaaaggaagagtgagataacaggcagacataattaagtataygtattatggcaggccattatgatttgaagtcatttgagtcagcctgtgtttgtgtgtgtgtgtgtgtgtgtgtgtggtggggggtgtattattttctcctctctgtgagcataaactacttgtcttaataaggttttggcttctattatttgttcataacctacctttaatgacttcaggaatagaagaaaaacaagacccttttcataacttctgttttcattataattgacataaaatgtgtggaattattccttttgaacagattctgagatttttgttttgttttgttttgtttggagatggtgtctcgctctgttacccaggatggagtgcagtggcgcggtcttggctcacagcaacccccgcctccagtgttcaagcgattctcctgcctcagcctcccaagtagctgggattacagaggcccgccaccatgcctggctaattttttgtatttttggtagagatggggtttcaccatgttggtctggctggtctcgaactcctgacctcatgatactcccacctcggcctcccaaagcaccgggattacagggactgaaagttttttaagtgattgattgttatctttaagtgcatgcagtctaattccttagctagtggttttttaaaatttcatcatgcatttttacacttcatacagcacattaaacattgatcagctttcttcatgatgtggccctttggtctgtaattaattcatttatttgaagaaagagaatactactgatagaaacagtaaagcgcaaggtaattaggggacattcttcaataaccaacagctgctgcaaagttgtttcagaccctgtgacctaacatctacctttttttactttttttctttttttagatggagttttgcccttgttgcccaggctggagtgcagtggcacgatctcggctcactgcaacctctgcctcccaggttcaagcgattctcctgcctcagcctccttagtagctgggattacaggcgcctgccaccatgcgtggctaattttttgtatttttagcacagacaggatttcatcatgttggccaggctggtctcgaactcctgacctcaggtgatccacccgtctcagcctcccgaagtgctgggattataggcataagccatcgctcccggccccaaacacctacttttgaataaaaacttgaggaggtctgagtgcagttaggtgtggttgagttaagtgtgctggtcagaatctttaaccaaggcttccataaaaggtaaagtttgtatatcaaaacaactataagttttactgtgggcaagggaagggaaatatgaaaaggaaattacattgtacttcatcaaacaagacttatttaagctctaatatttaggtgaatatgcatttattatttttttctttttttaaacctttagtttcgggggtacatgtgcatgtttgttatataggtgaattgcatgtcgtaggggtttggtgtatagcttattctgaaacctggtaataagcataatacctgatagctagtttttcagtgctcaccctcatcccaacttccactctcaagtaggacccagtaaatgttgttcccctctttgtgtccatacgtactccaagtttagctcccacttacataaatgagatcatgragtatttggttttctgttcctgtgttagattgcttaggataatggcctgcagctccatctgtgttgctgtaaaggacatgatctcattacttttatggctgcatagtattccattgtatatatgtaccacatttttaaaaatccagtctgctgttgatgggcatttagattgagtctatrtctttgctattgtgaatggtgctgtgttgaacatatgtgtgcatatatcttaayggtagaataatttatattcctttggatataatacccaataaggggatttctaggttgaatggtaattttgttttaagttcttgagaaatccccaaactcctttccacaatggctgaactaatttacactcccaccaacaattataagcattcccttttcttcacaaccttgccagcatctgttattttttgcctttttaataatagtcattcagattggtgtgagatgttaccccattgtggttttgatttgcatttctctaatgattagtaatgttgagcattttttcatatgcttgctggccatgtctatgtcttcttttgaaaagtgtctgttcatgtcctttatgcactttttaatggtgttatttggttttttcttgtaaatttaagttccttatagattctagatattagacctttgttgaatgagtagcttgcaaatattttcttccattctgtaggttgtctgtttactctgttggtagtttcttttgctgtgcagaagctctttagtttgattaggtcccatttgtcaatttttggttttgttgtaattgcttttggcatctttatcatgaaatctttgccaggtcctatgtccaaaataatatttcctaggttatcttccagggtttttatatgtttaggttttatatttaagtctttaattcatctcgagattatttttacagattgtttaaggaagrggtcsaattgcaatcttctgcatatgactgtccagttatctcagcaccatttattgaatagggagtcctttccccattgcttgtttttgtcaatgttgttgaaaatcagatggctgtaggtgtgcagcattatttctagattccctattctgttccagtggtctgtgtgtctgtttttgtaccagtaccttgctgtaaaagctctatttttatatttttcttcctgaaaatcccattcttttcttctcttcctccctttcttatacaaaattttaaaaacactttcagcatcttgactgtagctctttctttttctccctttagtatttttccctcactatagtctctttatatattctcttatgcaaatgcttcttgtctctttttcgtaatgatagctaacatttttgatgcttactgtttttcagggactacgctatgtatttcacatgcrttctctcaataacartaacaatcartcaataacaatctcattatccctattttcagatgaagaaactgaggctttgagatgtcaagtgacttgtctgtagtcacagagctcccaagttttagagctgtggtgagatcccagatctatctggctgtgaccaagcctcccaagccatgttcttaggttctgtgctgtgatatatgtccagtataaaacatttgaaagaaacataaaagtagaaatgtgctttttaaagcgctcataatctccatacccacaaaggacccaaattaaaacttcgctatctttctcttcagtgtgttttatgcataatgcatgggaatttttaaatttttaacacttactatgacttgatgatcattttaaatgagttaacatacttaaaaatgcgtaaaatcacaaatcttacttcaatggcggaaaaatttttttgttttatatatatatattcttattatactttaagttctagggtacatgtgcacaacgtgcaggtttgttacacatgtattcatgtgctatgttggtgtgctgtacgcattaactcatcatttacattaggtatatctcctaatgctatccctcccccagccccccaccccacaacaggccccggtgtatgatgtcccccttcctgtgtccatgtgttctcattgttcaattcccacctatgagtgagatcatgcagtgtttggttttttatccttgtgatagtttgctgagattgatggtttccagcttcatccatgtccctacaaaggacatgagctcatcattttttatggctgcacagtattccatggtgtatgtatgccatattttcttaatccagtctatcattgatggacatttgggttggttccaagtctttgctattgtgaatagtgccgcaataaacatacgtgtgcatgtgtctttatagcagcatgatttataatcctttgggtatatacccagtaatgggatggctgggtcaaatggtatttctagttctagatccctgaggaatagtcacactgcagaaaatattttagtaccttgagagagtagatattacctgttactttaaattatattgtcaaagtagaacaaataactcactaaatattrttttacttttcagtgatgctataccattttagaaaatacttgatttagtgcaaaatttagatgtgactcyttgaatacgggctamcgatagactatcctttttgtttctaaaatatttttggcaaggaatgcaccaaaatttctaaaggaaattctagaaagaatattaaaattaatctgcggatattacagacaattctggtttacaaggtgaaattgctgcagatgaatactgtagacttacgtgtataacatcaagtactaagagtgaaactgtcaacttaattagattggtagagtgagattggagagtaagtctgtatatgtaaacaacattttgttttttagagatggagtatcgcttttgatgcccaggctggtcttgaactcacggcttcataaaacaatgtccctcagaaatatgataaagcctgcatttgttactgtgacaaagtattccttgactttgaagctaattatatacttacatgcttcaaaatgaatacagttggtggctttactcacaaagtttatctactggtaaagagagcaaattaattttaaatagctatgaccctctagccaaaatctatttcaagtttytgggaggaagggaagttgastgccctagtttggcctgacatactttcctctctattttgagaatttgaatgtaaactaccccacctcccctacaaacaccaccattaaaaaaaaaaaaaattaaaacaatcaactctgagtgtctgagtatctttgtatcagtagaagctctagaaaaagtaaaaacaggttgaaattatgtccctgttttcaccaacactttgaccttgtcagtaaaattccactgtctttaaaatgggatccatactttataaattgtttaagtaagaacaaataagtgaaatgactggctgatattgcacatagtatgtcctttaaaagtttaaatttccawtctgttcacatttgaacaaatacttgagcacatctttgatccactcaatagcaagaactttcasatctatggtaggttacaatgtacacatctccacacatcagctatgggtactctcctgcacagtactatacagtacagttactgctctcactgactctggacatagtctctctccttttatgggatactgaagttcaaaaagataaagtggcctcaccgtggtcccacagttgatgaagaactgagactcaaatccaggcctcctgactgctagtcctaaagctgcctacttgatccacatattcaggaatgaacatctgatttaggctaygattttctcacaccagcaattgacaattaaggatcccactgtatacaaaaggaaaaaaatagagtttgaatagatatatatagcctccagaattttttttaaatgtcagccactcccttctatgaaaagcagtgttttaagatataattagtattctgagcatagagtgatggtaaacattatgttttgtattatcatgagatggcaaaattacccactctcaaaggaccagctgctgcagggcagctggcacccatgatgcctacattctcaaaactattttaattggtagtttcccttttttttttttttgtcaatcagagaggaaatgtatgtgtaagtctattaaagccatagcatctgttatgatgaaatgacattgccgaatcttaggaagtgaaatattccatctcaagattttgagactgctctgtgttcttactgaggcaagagttcctataactaaacaggtatagaaaagttatgcacaaaaacagatacaaaattcttcccatacttttcatataatattatcattgtagtcatcattttgaattgatatacacaacatacatgaaactattcatcacattagatgtatgtggtcctaagagrgaaaagctcaaattttgaaataggargacctgaaatcaaatccaatctctgctcaaattgctgacagctttaagcagaggacttaatcacttggaagtcttctcatttctataatgtagataataagttttattccacaaagttatagggagtatccaatagttgagaatattataaatcaacaaatattgcactgttatcaataacaaacatttattaggtgttcattacataagagagtatgtactaagtgcttatatgtgctttatctcatttaatcttccccaaaaggcttcctgatagatattactattatatccaatttacagatgagaatataataaggcttagagaggctaaggaaattaactatggttacaaacttaggaaatggagggcccaatcattgaacttagtcttattctttcacacattcaacaaatatttgctaaggaaagatcccctgaacaaaacgggacactgtttggaaggaggaagtggggaatgcaagttgagtaagcaaaccaaccatgttcactgtacsctggccactgtgtagtgaatggattgaaaggtaacaagagagaatccaagaaggctaggtcggcgtttgtggaggtggttcacctgagagatgatgttgatttcaaccagggtggtagcaatgaagatgaagaaacctagatggactgaggctatacttgcaggtagaactgactgcgtggtggtgggggaaaagaagcatcaagcaaaggaggcccctcatttttgactctgagcaacatggtgatctgagattggggacactagaatgaatatacagagtgagggaaagaaatttttgtaatctcaagccccgtgctcttaaccattattaatgttatcactaattattatcatgaaaataaaatatatttggagtcgatggccacataactttaaactacctggaaaggtttatggaaatgtcaaattattcctttccatgtgaaaatgaaaaaaaaaaagaggaaagtttgatgtagaatttgttgtggttcttaattttcaaagtaagcacctaggaacaggattatctgaggttctccttgaactttgtaaatctgaacttcagtatttataatattataagatgaatcgaggtggagaggagggtggggaaacactggaagataatttgccagaaagctgacagacttatttaatttattattattactattttctttttttgagatggagtcccgctctgtctcccaggctggagtatagtggcgtgatctcggctcactgcaacctccaccctcgggattcaagcaattctcttttctcagcctcccaagtagctgaactacaggcacacaccaccatgcccagctaatttttgtatttttggtagagacggggtttcaccatattggtcaggctggtctcgaacccctgacctcaggtgatcctgccaccttggcctcccaaagtgctgggattacaggcatgagccaccgcacccaacctaataggtttattttagatgattgagtcaagtatattttttcttctacctttttatatttttcagatatttgaaaatgattacttattacttttataactagtaaattaaaaatttgagaaaattagtctgtaaataattgtatttgttatgtctatatagttcatggtagtaagttctgagaaccactcaaattgtaactttcagtcaaaccaattaaaataatgatgtaacttacagaggccttaaaatacatgcccttctaactatgccgtatgtgtaagcagtcccagtcaaagtggactggagtttaggatgggaactgaccagtagtatggtcaaaagtggttaggaagaaggctaagaggcttgagkagtttgacattttttagrtttccttcatttgaagcatccttccaaatttaaatattttaaaattttttagattctttactttcccacttcttaaggtcagataaacataataatattctttaagaaatcctgctagccacttctgaatcttgactcttttccttccttgcagggtcaatgattgtatcttgcgggtgaatgaggttgatgtgtcagaggtttcccacagtaaagcggtggaagccctgaaggaagcagggtctatcgttcggctgtatgtgcgtagaagacgacctattttggagaccgttgtggaaatcaaactgttcaaaggccctaaaggtaatcaaaatataaatgactcacagacactagtgacaaaccatctgactgaagtttatgccacgatagtcgtatgatgaactctttaacctctgacattcagtgcttaccaagagatttaaaatcctacagtagtggttacaaagggtaaaggaaaccagtactctaaatatgaactcagataagaaggaaagagtagatttatgtagaaacatccttaaaaacaaaaatattaacagtcatctatgtttttctataaatttttaatcttactgggtcatgataacttagctagcatattaatactaatttttcagatacaaatggtraatcctctcatttggcaaaatagtaatataaataataattaaaataatctgtactaatataacaattatatttttataatgttgtgatatgtttaaagtttggttatattcttatgtgttgtacccaatattacatgacattttatgcttgcagtagccaaaataagttaaaatttatgttcttgaaatgttctcgtatctcttgagattattatagttactctgaggagttgcagaaacagatgaattaccaccctaatttttgtttgtttgttttttgttttgttttgttttgttttaaggcagggtctcactctgttgcccaggctagagtgcagtggcaggatcatgactcattgaagcctcaagctcctgggctcaagtgatcctcccatctcagcctctcaaatagctgggactacaggcatgcactagtgcatgtggttattattattattattattattattattattattattattattktatttgttttttggtagagacagacccttgctttgttgcccaggctggtcttgaactcctggtcataagtaatcctcctgctttggcctcccaaagtgttgggattacaggtgagagccactgtacctggcccatactaatttttaagaataatgctttgaactctgttcttcagaatgatgacattaagtagtaacttaatagtatttaatgttttggaaaaaatctaataattagcttaacattatttaaatattttagatgattttgaccaaataatcactgtactctttgagtaaatcatttctcatttctttaaaatctatttaatctctaatgctatatgagattgaaaaaataagcctaccatctcttctaggaggcagtagtgggtggtatttaagatctcaggactgagtttaaaagcctggttcaaccacttgctagcagagtcatcttagttgggcctgctccctcattattaaatggggatcataatggtagcatcaatccatagggtttatgaggattaagcatttagccaatagctggcacatggtaagcaatagagcctggtggttaagatgcagactctacagcccagagtttctagattagtaccttggctctgcagctcactagctgtttggccttgagcaaattgcttaacctctctgggccatattttctcatctacaaagtgcamataagaatagtacttgctcctagagatgttgtgaggattagatgagttgattcacaaaaagtatttagaataaggcctggcacaaactgaccgaccaacaaaattagctacatatgcatgttatctgtactattatttactacatatggttttaaactttgtaacaattgtttggtaatgtaatgaaaatattcagagattcctcatgggtcaaattcaaatgtgttaaaatcatagaactaaatctgggtaaaaagaaaaaaaagtgaagcattttcatgccacagtctctagtggtatgaaagactttcaaccctcacatttactaaaatcatattgcaaggagctttaaagccaaacaaaatggccatacccattatttctattaaaaatatatattatatgtagctatttctgtaattcaattaactgtaattattcagcatagccctaagacaaatactaattttaaccactcagtaaagaaagtaacatcatgcatttatagaccttcttctagctgagcagctggaggtcatccagagcacttaaaggctatagatgactaaaacttaattttaccaagaacacatattttagatctttatttttgacactggggctccagctggtttacttcatgctgaactgctttcttccttgagcccggagtggggcagtaattgctgtgggacctggaatggggaaatggggagaagtgagtattaatcaacttggtatacctaggcaataacccagttaaagtatacagtgtatgggagatggggttacaagtgagcttggtctactgagatgaggagaaccagataactgttggaaataacttcgcatccctaaaaagcaggctcttgcgaaattcctgtagagagaggtgagactattgggcctgttgcggttatgctgagtcagtcatacttctttctactgtcgctgtccagaggtcactgatggagatttgtttctctatataaagcttaytgatttacagaaaaactattttagtcattgtttaaattcctcatccctctcctagtaccataaacacagctagtgctgaatcagagtaagttgaatacttaaactggattttacactaactctgatgatacctcgtggtcttaacttcacttggcaccttataattcttcatttttgaattacaatatgtgtaaagggaattcctaccaatgtttaactcatacagtggaaactcttatgcaccctggagtgaagataaatgagatgtcgtctctgtcctcagaaagtttaaatgggagagatgcacttgaagtcaactacctttaatgcaacagaaaatgaactcagctctataatggagcctgagccatgatttcactggaacaaagtggaagatgtgattcgtcataactaggagagacaaaatggtccagaggatttaaaattttcagcaaactaatgcagtaacagaaaaccaaacaccacatggtctcagtcgtgggagttgaacaatgagaacacatggacacagggaggggaacttyacacaccagggcctgttccggggttgtggggaaggggagggatagcattaggacaaataactaatgcacacggggcttaaaacctagatgaygggttgataggtgcagcaaaccaccatggtacatgtatatctatgtaacaaacctgcacattctgtacatgtattccagaactttaaaagaaaaaaaaaacttaacatgtgcatagtttatctgaccttccttgagcacatgggtacaatatagtaagcatcaaaaatctagccaactgagctaactggattgaattatgtatatataatacagagttatctagatatacattaatrtagtccttcaatgattcaacaaatacgtattgtttagtatgtacctggcacagatccagacaatagagattcacaaagaaaattcagatagttcttgctctcaaggagatgatagcctggtggggaaaacacctataatataaattgggaaaagtactaggaataaatgtaacagattgttaagggggtgccaattaaatagtgggtcaaaggagacttctgtaagcaagtgtcacttaagctaagctttgaaatataaattaaaacagacatttagccaggtaaagaatggggtctcgagagcatcccagatagaagtagaggcatgtgagtgtgatggctatagtgyaggaaaagatcttgataacttctaggagtctaataatatgaaaattaattacatgaaatgatatggctgagatgagcaagggccagatcatgcttagctttgttcaccatatttgaagatttgtgtttatattgaaatgcaatgggaaattattgtgatattttaagcatgagtgacacatgataaaatatgtaatttttagaaggtcattctggctgctatgaagcgaatgaattgaagagggcagaagtgagagcagagatcagttaggggttacttggaggaaggagaaaaaagtaaatggatttgagctatcttgatgccatttattggtaaaatakatggtgktgtttcaaggatgrggttcagttttttagttggggtgccatttktgaggtagggaagattatgaaggaatctctgaggacagagggaacctctgatgtgtctgaaaaggaaatctcaaggaagcagaactggagaaggtctgtctaaaaaccctgccaaattaacatattgatttttcactatattttgtgaaatatctgggtttgggaaaatatttttaaattgacttttttcctttttattaatcttaatataaaaaatatgaatatggctacttcagctattttaaagagttaatgcatttaataaatctattttatagattttatagattattaatgccaagaatgttttcagtttggggattgtgtttgtttttgcacagaatagaggataaacagatttatccctttgtatgctgtaggtaaaacattaagagattctgtgaaacagtgatttgtggcaaattaaatttacagtttttcaatttcgtactctgtattgatttggtctattgcaaaaattactaatttgagataacctttgatgtatgtgattttgtctttatagcagagctaatcttcccaacactcagatagaatcaatcatctcattggtgatttatagccatatatttcagtaatggatatttgggtaatactcattctgacttagaatgtcttttctcaaaataggtagaaaccttgctaacatcacagttatagatttggtcattgtaagcacctggggtgtctgcatgtgggcaatcaattgagaagaaaataggtaattatatgtaggaagaaagtattaggcaaatccatttaggcttgccaagcaaccaaaaatcaagcaaaggaaggaaatctgaagtgtgtatgtgggtttccaggaaatagatttactrtaaaaggcttcctagtgactttcgcaagaacacattaaatcataactyccaaggagctattaatatataattaaacaagtacagaactgtttgtttctatggcctgggccaaagaagcctaaagctacaggagaaattagatgacttcttttaagatgctgttgttgcttaggaatcatataagtggtttaaggctaagttctaaaaccaaaaatgtgaaagctacagttttattaattgatatccaaaggtggtcttgcttgtagctttattttagccaccttactcattaataaaaactgaaagagtgattaaatctaggtagtgacaatttttagcaattctcctccattattttttaaaatgtttttaaattctcatatctctatagatacatactttttgccattacagagctctgtatcagtgtaaactgagaatgtagtaaagattgtgagtttatgttttgtacaggaaaaatggtaactatgaaatgcacaaactgtagaagttactataccaatgaacacttataatgttcataattcagccattaaagaagacacatatgtaatgaagaagttcctggatatcttcaagcagccatgagcctagaacaaagatatgaaccactttatgactcactttccgcatctgcaaaatggctatatctaaatatgtaattcatagagttattttcaggataagaattgtaaattcttaataaattcttataatctttttactcttattaccatatttggcagaaggggaaataaagaaaagtagcaaagaactcattaatactaagggactaaaggattagattgtatttaatataatatttaatataaaatactatgagaggttcttttttttccttcaacttttaatttaagttcagaggtatatgtgcaggatgtgcaggtttgttacataggtaaacgtgtgccatggtggttggctacacagatcatcccatcacctaggtattaagcccagcatccaacagctattcttcctagtacctgatgctctcccttcctcctgcttcccctccaacaggccccagtgtgtgttgtttccttccatgtgtccgtgtattctcattgctcagctgccacttgtaagtgagaacatgctgtatctggctttctgttcctgcattagtttgctgatgataatggcttccaattccatctatgtctctgcaaaggacatgatctccttccttttttatggctgcatagtattccatggtgtatatataccacatttatttatccagtctgtcattgatgggcattkaggttcattccatgtctttgctattgtgaatagtgctgcaatgaacagacacctgcatgtatctttataatagaatgatttatatttctttgggtatataccctgtggtgggattgctgagtcaaatggtacatctgcctttaggtctttgaggactatcttccacagtggctaaactaatttatgttcctaccaacaatgtaaaagcattccatttccacactgtcttccacaatggttaaactcatttacactcccaccaacagtgtaaaagcattccattttctccacaaccttgcctgcatctgttttttttttttttttgactttttaataatagccattctagctggtgtgagatggtatctcattgtggttttaatttgcatttctctgatgatcagtgacgttgagctttttttcatatgtttgttggctgcatgtctgtcttcttttgagaaggttctgttcatgtcctttgcccactttttaatggggttgttttttttcttgtaaatttgtttaagttctttgtagattctggatgttagacctttgtcagatggacagattaaaaaaatttgggggaggtcctttaaaagcactagaatatttgttgaattaatgaattgactatttattaaaagcttttaatatttagcgattccagatagaaccaatatatatttggcttatgcatgcatgtatgcatatatataatatgtaaatatatttatgttatgtgtatatgcacatatatgttatgtacagctgtattttttctttagctctatataaatttgtttctaacaggtttgagttatgatgtgtcatataactctatgctttatgaaaatgcacatatatgtttgggatttttctttggttttcccagtttgggcatctgtgtcagggtatgccatgtgcagaaatagctccaagtatattaaaacttagccttatgatatctccttagcaccaggttccatcactcgcccctcacccatatgacctactcctgcttttgacctctccrtttattcaaacgattgtcttagtcacccacagtaaaaggccttggacgtcctttttttccttttggttctctcttctttgctgctttaataaatcaggcacataccttttggaagccacttacaaaatattaatcctctctttaaaatctctactgccattattatggtgttcctgtcttctttttttttctttttttttatattatactttaagttttagggtacatgtgcacaacgtgcaggttagttacatatgtatacatgtgccatgttggtgtgctgcacccagtaactcgtcatttaacattaggtatatctcctaatgctatccctcccccctcccccaccccacaacaggccccggtgtatgatgttccccttcctgtatccatgtgttctcattgttcagttcccacctatgagtgagaacatgcagtgtttggtattttgtccttgcgatagtttgctgagaatgatggtttccagcttcatccatgtccctacaaaggacatgaactcatcatttttgatggctgcatagtattccatggtgtatgtgtgccatattttcttaatccagtctatcattgttggacatttsggttggttccaartctttgctattgtgaatagtgccacaataaacatacgtgtgcatgtgtctttctagcaacacratttataatcctttgggtatatacccagtaatgggatttctgggtcaaatggtatttctagttctagatccctgaggaatcaccacactgacttccacaatggttgaactagtttacactcccaccaacagtgtaaaagtgttcctatttctccacatcctctccagcacccgttatttcctgwctttttaatgatcgccattctaagtggtgtgagatggtatctcactgtgattttgatttgcatttctctgatggccagygatgatgagcattttttcatgtgtcttttggctgcataaatgtcttctcaatcctaagccaaaagaacaaagctggaggcatcttgctacctggcttcaaactatattacaaggctacagtaaccaaaacagcatggtactggtaccaaaacagagatgtagaccaatgcaacagaacagagccctcagaaataatgccrcatatctacaaccatctgatctttgacaaacctgacaaaaacaagaaatggggaaactattccctatttaataaatggtgctgggaaaactggctagccatatgtagaaagctgaaactggatcccttccttacaccttacacaaaaattaattcaagatggattaaagacttaaatgttagacctaaaaccatacaaacctagaagaaaacctaggcaataccattcaggacataggcatgggcaaggacttcatgtctaaaccaccaaaagcagtggcaacaaaagtcaaaattgacaaatgggatctcattaaactaaagagcttctgcacagcgaaagaaactaccatcagagtgaacaggcaacctacagaatgggagaaaaattttgcaatctactcatctgacaaaaggctaatatccagaatctacaatgaactccaacaaatttacaagaaaaaaacaaccccatcaacaagtgggcgatggatatgaacagacacttctcaaaagaagacatttatgcagcctgtcgacattcttgatatcttatctggcgtactataataggcttcattgctggtccctcccttccataccaacacatatcttctataccaatcttccaaaaattcaaaactgttcatgattctcccctggtaaaaaaaaaaaaaaaagtctccagtagtttttcattgccagtaagtagcattttaggcactctgtgatctctttctcctccagccacaaaacttggtttcagtcttctcttcttcattgtcccattcacatctctcctgatgcaggtgagctgccctgtgtaccatttcttaaacatatgccatattttccttcctctaagcctttgttcatttcattcccaactttgaatgtcttctcttactattgtgaccactatctgctgacatcatatccatcccccaagagccagttcagtgttaacttctccataaagctatcactaattgacgcaatcagaagcaayctttcatttctaacaacttctgatgtgctttatttcttccttttytgttcattcttttattatcaggccaagtaacccatagggcatgaaaaggatgaatatcaacaacccagattaaggagataaagaaaccgctaattctaaccctaagtcattaatgtaatgatgtctatcctggccaatgctaaatttgaagcattaagtgatacttaaaaggaaagtacaagctccagtctgtgacccagttctgggtagtaaatgggaagaattggggcagagatgagtggggagtgcaaggtagatcataaccatcaaagcaatgtggcaaggggaaaaggaatggctcagatggaagctgacagtttttcaactgcgaagagtccgtatgagtgaagcccatgttttggcaccttaccttttttcactccttacagaaattgtatgtacaagaaattggaggcatctggcacattgcttaccagtccacttaatcaaaaaacaatttctagatatttgatttttactttattgtataactgatgtgacaaatttcatgtccagcttatctaaatatcaacttgacttgcatctgatattatagatgagaatttattaaatatctaacttaaataaattttaccagcttttctatttatcrtactcatttcctttatcagatctgttcttactcctccatctgctcctggtttttgtttttttttctgatgcccatatggccaaagtgaactatccagtcttgatgtgaggaagtcatctgaaaatttcctgacattagtcatttggctaattgataggcctagagctgtcttattgagaatgaacactgaatgaattaaaattttaattgaaaattaaatgcactgttcttaacacttagtaccgagactgtctgcaccaaaattcttcttttttccctgatctgtccatggatagctttgtcaatagtgtgtgtgtgtgtttttttttctttaacaagttggattttctatcttgtaaccataataacttggagatgtttaggttagcaaaggtattagttatctgaaattcagcavttcatgaccaagcattttaccagaccactggtagaaactaaaaacaaagtttgtacaactggtttgattactggcacccaaccgtttactgtatcaggggacctcatgcattttcttatttcttgccatggagtaaattactatgtttattcattttctaatgcatgtgcaaaaatgtctctgaatacaggaaacagtttactttttattcaggctcatgtcctgggatcaagttcctagtggtaggtggacctgttttaggtgaaaggccatgctggaacaatgatttgttcaataagcacgaatagcaaatttaactatttggcatgagttctcaaaacactacattttccttttagtgctaattttttaaatccttttgaattaccacaatggttccctggggtacacaaggaaatttacttgagtatatatatagtgcaaccttctattggaataaaatatatggaataagaaagaaagtggtgaactatttgtcttaaaccagggaaacagtcttcttagaaataaattgtagctaaattaccgctctcctgtctaccagagagcaaatcttttattattattattattattattaaatgaaggacaccatatttgataaattcaccttgttcccaggtacttttcctgtagaatttcttgtgcatgcacgttgttaatttctgattatttctggatataagacatatgcttgtgaattgggaggctctttctctaagctaatatttggtcaatattcataatgatgtctgtaaacaagctctctcctaagattgtgtagcaaatcatttatcatgaaagaacaaactacaaatattgccactgtaattcccactgttctgtataatacaacattatgagagaattaatcacatgattatgtttgctaaatctttttggaaattaatgaatgatgccactcctgtcatgtgccctttggggataacatgaccactgtttcttttcacagttttcttatttgctgtttaaagctgatctataattttttaacagaatatatgatcaatggctccttgaacaaatttttgaagtcaaaattatttttacaatgaaaatttcagatttaaataattgcactgtactaaatgtacttttggtttttcaacatttaaagttttatcattcacacaacaagccctgtgaaaagctgtgaatagttactcaaggtaaatatttacctacatggaattgtttgtaagctttaaaraaaatgctgctgtggtaaatacaactataaattttttaaatttatggccagcagcaaagcaatttgatgaaaagactgggatttggagctaggacctaagttgaaatccttgcttaacttaaataagcattagagatattgggtatgtatcggcatctaattaaattttaagtgttcttctttttgtttacttttttaaaagraaatatgcacagaaaacaatcatctattcactcaataaatattttatttcaaaaacatattaggtctggaagttgtaatgctaaattaaaggaatgagaataaataaagtagttttggcttttttcccaagtatcttcttagaagactggcatttacctaaactgaaataatgcagtcctcctctgctgactgatactgacttcatgctaaattcttcatgatccctgactaaatccattttggttcctcaactcatggaccaatgtccgttaaatttttcgccttctatggaacactgagatccaatacattaaaacttgcagtactttctattcatggaccatgactcctaatgccactaagctgtcagtcaaaagcctgtactacatagactttgtctctgaacataactcaattgtagatagatactttgggtactttatcgcatatagaaaacttactaggaaagataaaatgaaatctattttaatatctgtaaagaacaccagcttatgcatttttaaacatggaaaattctatgggttatctagttatgagatcccactgagttcactgaaaattgaaaaattgcaaaataaaggttgatattaggcaagattgagaattattagtcaaggctgaagaaagagtagttaagaaaaaagaagagtaaaaatgacacaggaaacaaactaggtacatttctggaagagtcagtgccttatcgtggtgaatgaaggtatatacatatgatttgttcagtataagccattagtcacatgaagcaacagttcaatagttacttcccagggacctaaaaatagtcattgagtttttagtagtagtagagtcaaaatgaaaattttattcttcatagttccatttatttgaatcarctgaatgtggtagcagtttttttaattataataattttgatgttcaagaattctaagatgtcaaatattctgatctctctsaatacacagattcactcatatattttcactcattacgtttaatagcaaaaagcacacaattacttttgcaccaaactaatatttaacaaagcattaattgaacatgctctgaagacaagactaaaaattgggtatagaaacatggtgtgccctcaaaggaaatagtggtcacagtatagtgtgtaaaatgtgacagtactataaatatatgcccaggctttttctaggaaaccgtgaccaagtcttcaatttatgctttaatactctggagagaaagttttcccatactaatggtagctgttcacttgggagactgtgcccatcactggatttttttttctataattgagctgaaagtagaattcctctaaaattttccattaatcttgtttttgctttctacggctacagcggacaactcttcacaagagagcccttcagacatttgtaggccactgtcaagtctcctttcaggactctttcctttagattaagacccccagttcattaaccattcttgattcatcatcatttttaatccctttattttgctgtagagaaattttctctacaaatttctataaattttctctacaaatttctataaattttggcagtatcccacctaagtaacaatacacagaattggatatacagatccctttgtgtgcttgtaagcacagaccatagtgagtgaattttgtgcacgtgagctccatactctacttctgttattgtagtataaaattgtgttagctttgtttttaagaatctttttgttggttcatgtcaagaataagacaattgaatattatttcatatgaagttttggctatcagatctattacattttattttagaataattttgtatttgtagacttatacacttgttttatctctattgaatgtaatattgttggactgcacctagcatctggacctattgatatcaatctcagtagtgactcagcaattccttatattcaccaccctttcctcatctatcaattataggtaacctgaaggtaaacaaattggattatcagaaataagatggaatttggcaagtgcatatgttacccagcacatatagatataaaagtgaataccacaggtataaggaagggctggttataaaaataatggaaagataaacataaaaataatgtccttagggaaagttttttatgaaacacartgtgcatactactaaagaactgttttccagattatgagaacaggttattttctccttcagtaactcacaaaatgagtaaaacttagggacaattagcaaccaaaaccattagaaaattttgcctacagtgacaaaagaagcagtggagcacaacttaatgcaatacacttaaaaacctgtgactaaaagaaggaaattgtagcagaaaggcttagagaggctcagatgctacctgactcccatttccctcctgagattgtacgggtgattgacaaaatcctaagacttctcactgataccattaaatccagagaagagcacactgagctagtaggcttatctttttcaaagagtagttgaaacttgtgattgagaaagtctaaagggggtaaagtgagtagctatgctgatattctctggtggaaataaatgttctctagccacactccaaattagagaaatttctccaattagatgcaacttggtgtaggacatttaacaaaatctcaaaagctaacagaattggggtcttacaagaaaaatgacacacttgcctgtagcctctaccgagatctcttccaacacccttgccagctattgctcaggcacaaaatgtgatgagaacacaaaatagccagacctccactcccactgtaacttggygtgggaaaacaaaatrattctaggcacaaaggacaaaggtaaaccagtcacatgcgttatatcagagcaaatagaatgtccarttgagctgcccaatcatgagcaggatgaaakaatttagtaactctgtaagaatgccgcaatcaaaaccagaaagaagcgtattattgtaatctaatctattaagcacctggtatgtattaggtggtgttctaatgttttatgcatacatattttagtccttttaagaaaccctataggtattgttattttatgtacagtttggaggtttaataacttgcctaaaatcatacaaatgatgacagagccaggacacaaatcactggtgtctggctccagagctcatgctattaaccctgtgtgatcttggtcttcataacctctaaaaaaaagaagaagaaaataaggaagagagggagggagcaaaggaaggagacaaagagtttaacctatagttcaaggggcagaagggaattaattgctcatgatttatgctgtaggaaaacttaaaataaattcaattaaaaagtgctgaaatacaaaaaataaagktagaaaatggggtgaaaagaaagattgaagcccagggaacccaataaagggcctaaataataccattacagaacttatgaatatgttacaaataggaagaaaaaatagatgtcactgaaaatagcgacaaagagcaaagcttgagataattatgatgagcacagacttcacaaaaattaaaaaaagaagagagaaaaactttaaagctataycaaacaggagctatagagcttcaagaaaatgagctagtggcccaaggagtattgatttagtcaagcattcaaaaaatatatcactttttcagagaaacaacatacactggggcctacttgagagtggagggtttggggaggaagagagtgagaaaagataactrttgagtaccaggcttagcacctgggtgaagaaataatctgtacaacaaacccttgtgacccgagtttacgtatataacaaacctgcacacgtacctcagaacctaaaataaaatattaaattaaaaatccaaaaaacatatcactctttcctaaaatatgcccttcatcaaaactgttatttgtatcattttagatgtaaatctgatgatgaattgaaaagaagaaaaaatatatttatgatgataaaccaaaggaaataatttaaaaattattttaagcaataaattttttaaatttatttatttaatttatttaagcaataaatttaattaataaattgctcaatttataattaattaataaattgcttaaataaatttaagcaataaatttttaattaatttatttaggcaataaataagatggccaagtttaaaatcagaatatagaaatcaatagcatatacatatatgtccatatataagcagtagtcaactaaaaaatataatgacagaaagtatatcatttacaataccccaaaatatcttaagaatacacttttaaaagcccagaatgcattagctmtttttcctgttgctctccctccctgcacctcaccccctacaggccccagtatgtgttgtttttccccatgtgtccatgtgttctcattgttcagctcccacttataagtgagaacatgtggtgtttggttttctgatcctgctttagtttgctgaggataatggctccaattccatccatgcccctctaaaggacatgatctcattcctttttatggttgcatagtattccatggcacacatttacctatgtaacaaacctgcacaccctgcacatgtaccctggaacttaaaaagaagagaataaacttgataaacatttgggatctatataaaggtaactttcaaatgctaccaagagacatataataaaggaataccataatgtgccattggaaaagaagagcaacatcaaaaaatttcaatttttacttttatactaaaaattttaaataaaaataacaaaaattttatgcaagaaaatctgatttttaaatttaaatgaaaaattaatgagcaataatagcaaggaaaatttataaaaagaacaataatgagagagatccaggcttaccatttattaagacatcatacaaarttttaataactaaaataaaaattaagatatatcaaagttaaagactatagattctgaaaatagacaagacacataaaggaatttagtttataatatrgttggcaatttgattaagtgggaaaaaatggattgttcaataagttatattgggaaaactggacatctatctttaaaaaacagttgtgtccctttttcacaacctacatctgtacaagtctgttttcatgctgctgataaagagatacctgagactgggcattttacaaaagaaattgtttattgaacttacagtttcacgtggctggggaggcctcacaatcatggtggaaggtgaaaggcacatctcacatggtggcacacaagagaagagagcttgtacagggaaactcccagttttaaaaccatcagatctcatgagactcattcactatcacaagaacatcacaggaaagacccatccccataattcaatcaccgcccaccagtttcctcccataacacatgggaattgtgggaattacatttcaagatggaatttgggtggggacatagccaaaccatatcaacatacaaaaaacatttctatatttaaatataaatgtttattttaaaaatgaaagcgtacaactataaaggaaattgggtaaattgacctatattaaaattmggaaattctattcattaaatgatgtcaytgacagagtaaaacaggaagacatagagtggagaaaatattcccagtaaatttatcatacatttatataatgttcagccttattcataataaaataattgcaagttaaaagtacaagatgccatttttttaactatcaaattgcccacattcaaaaattgtgacgatgcactgtgttaggaggtgtggtaaaagaggctctttctgagagctgaaggaggctggtggagtataaattgttccatattcttggagagcaataccaaaatatctttaactttataactgcttaaaccctttggcatagtgattctacttctaggaatttatcctatatatgtacctgcctatgagtgaaatggcaatattaattgcaacagtgtttccagtggcaaaaatcgaaccaaaaaaatctaaatgacaaaagaatagctacaataattktattgcatccatatagtatactgtaatgccattcagctttttaaaaatgaggagctgacagcccaaaatctccttaagctgataagcaacttcagcaaagtctcaggatacaaaatcaatgtacaaaaatcacaagcattcttatacaccaacaacagacaaacagagagccaaatcatgagtgaactcccattcacaattgcttcaaagagaataaaatacctaggaatccaacttacaagggatatgaaggacctcttcaaggagaactacaaaccactgctcaaggaaataaaagaggatacaaacaaatggaagaacattccatgctcatgcgtaggaagaatcaatatcatgaaaatggccatactgcccaaggtaatttacagattcaatgccatccccatcaagctaccaatgactttcttcacagaattggaaaaaactactttaaagttcatatggaaccaaaaaagagcccgcatcaccaaggcaatcctaagccaaaagaacaaagctggaggcatcacactacctgacttcaaactatactacaaggctacagtaaccaaaacagcatggtactggtaccaaaacagagatatggatcaatggaacagaacagagccctcagaaataatgccgcatatctacaactatctgatctttgacaaacctgagaaaaacaggcaatggggaaaggattccctatttaataaatggtgcygggaaaactggctagccatatgtagaaagctgaaactggatcccttccttacacattatacaaaaatcaattcaagatggattaaagacttaaacgttagacctaaaaccataaaaatcctagaagaaaacctaggcattaccattcaggacataggcatgggcaaggacttcatgtccaaaacaccaaaagcaatggcaacaaaagccaaaattgacaaatggaatctaattaaactaaagagcttctgcacagcaaaagaaactaccatcagagtgaacaggcaacctacaaaatgggagaaaattttcacaacctactcatctgacaaagggctaatatccagaatctacaatgaactcaaacaaatttacaagaaaaaaacaaacaaccctatcaaaaagtgggcgaaggacatgaacagacacttctcaaaagaagacatttatgcagccaaagaacacatgaaaaaatgctcatcatcactggccatcagagaaatgcaaatcaaaaccacaatgagataccatctcacaccagttagaatggcaatcattaaaaagtcaggaaacaacaggtgctggagaggatgtggagagataggaacacttatacactgttggtgggactgtaaactagttcaaccactgtggaagtcagtgtggcgattcctcagggatctagaactagaaataccatttgacccagccatcccattactgggtatatacccaaaggactataaatcatgctgctataaagacacatgcacacgtatgtttattgcggcattattcacaatagcaaagacttggaaccaacccaaatgtccaacaatgatagactggattaagaaaatgtggcacatatacaccatggaatactatgcagccataaaaaatgatgagttcttgtcctttgtagggacatggatgaaattggaaatcatcattctcagtaaactatcgcaagaacaaaaaaccaaacaccacatattctcactcataggtgggaattgaacaatgagatcacatggacacaggaaggggaatatcacactctggggactgttgtggggtggggggcggggggagggatagcattaggagatacacctaatggtagatgacgagttagtgggtgcagcgcaccarcatggcacatgtatacatatgtaactaacctgcacaatgtgcacatgtaccctaaatcttaaagtataataataaaaaaaaaattaactagaaaaaaaaatgaggagctgaaataaatatattaaatgaatgaatgcacttaaagtactgaatgaataaaatgaatgtactgaaatggaacaaaatcctgtgtatattgttaaattacctaaacattgtgggcggtatgcgtaatgttatatgatttgtcttaaaaaacaaataaaactttaaaacaaatctcatcttgtagttcccataatgcccacgtgtcatgggaggggcctggtgggaggtaattgaatcatgagggaagttacctccatgctgttcyagtgatattgagtgagttcttacaagatctaatggttttataaggggtttttcccctttggctcatcacttctcattcctaacatcatgtgaagaaggatgtgtttgcttcctcttctgccatgattgtaagtttcctgaggccttccaagccatgctgaactgagagtcaattaaacttttctcctttataaattgccaagtcttgggtatatctttattggtagtgtgagaacagactaacagacttatatatacatagaatatggataatatctggaatatcttgaaaagtaactgacaacagtagttgccccagagagggaagctatgtgggaagaaaatttagtttttctgtttgttctttataccttttagatttttctaccatgtacatatattacattatttttaataagcaaatacttttttaaaaaaacacaaagtttttataatagccattccgactggtgttagatggtatctaattgtggttttgatttacatttctctaatgatcagtgatgttgagctttttttcatgtgattgttggctgcatgtatgtctaattttgagaagcgtctgttcatgtcctttgcccacttttttatggggttgtttttttttcttgtaaatttgtttaacttccttataaatgttggatattagacctttgttagatgcatattttgagagaattttctctcattctgtagattgtctgtttgctcagytgatagtttattttgttgtggagaagccatagaggggaacaaccacactggggcctagtggaaggtggagccgggaaggagggagaggatcaggaaaaataactaatgggcactatgcttaatacctgggtgatgaaataatctaccacaaaccsccatgacacaaatttacatagataacaaacctgcacttgtactcctgaacttaaaataaaagttaaaaggaaaaaaagaaaacacaaagtttaaaaatggaaaggtgagcaaagatatgcaaagagaagtagtctcagcaagaaaaaagtgattactttttgcccatacaaataaaaatactatgtaccatgaaattataaccagttaatagaaatattaacatcaacatgtatgaaactgaaaatgttaaaaatgcatggagaaatgggaaaaactaccatttaatatacattttgaaagacatttggctcagaagaggaagaataagtggattcatttcaaataattcaacaaacatttaatttagtatctaccaccataagccaggaaatgtgctaaagacagggagtacataaatgatgaagacttttctctctccttcattgtccatgatatattattagagcctttaaagaatatcctttaatcagaactgtcttgaaatacagttttttacatttaagtcaatatgttatataaacagtctgaacagattcacattaaccaaagtgaatcaaagctattgtttttcctgtatatcaaacctattctctaactaaaagaaactgactttattttatgagtcttgtctttagaaatttcaactagctgtcttctttgatactctattctttcccaggtgttcatgctttgattttctgatgaattgaagcagtgtgtggagaagattttttaaaaagagagacattagaacaaaaggtgcataattttcagaagtatctttctccatgcttaaattcagactagaattgatattttcatttgtttaataggaagctaaccatttcagactccacatttgcattcactaataaaagataatcttttaggtatattacctgttacatggatytcctcgctgcttcaaatagcaaagcagtgtattcacttgcttatctgtcataygtatttctaccctaaattgttactgayaataagcatttcagatggccccagcaagattgataatgatctttttcctgatggctccattagatcagacttcagaagcattgtactttgcatgagtccttggaagctaaatatgaaagttgaatgtttggcaacacaccgacctagctgatgaaattggattgctctcttctaaatatttacttcagcactttgaaattagtctgtattcattcacagaaggtgctgtgacccactcagtgaggaatcatagctagttacttctcctattagcttagttggtacaattccttgttattgtaattcacaagttttaaaacttttagctggaagattttcttataattttttctaagaaaactcttgcaatttaagtaaccttaaaaataaaaattatctgggctttcatcaatgcaattcctcagtaagaaaacataattgtgagaaatggtatcatggaaaatgtaatagttgattgtgaaagcttcagttttgctgccatttgtattcatgatgcctttgagttaaaaacgttagtaatggaattgagatgggacatctgttagagtgaaacatttgattcattaatcaattgaaaataaaaaaaacattttggagcttctggcttacttgtttttccttgtttctcaagccctagcaacaacatttcattttcatgaaggatatcagctattctgggaagaagctagtttggttttccaataatgtgctcccaagatttatctgtgacgatatacaagtagataagtttagataaggaaattacagaggttctcaaacttttttttttctttaacctctaaagcctagagttcccgaagattcagtgttggtacctccgtatttctctatcaacctcttctcctaggtagtctcatcaggacctatgcttcaggtttcataagttccatccctatgcttacatttttctttatgcttatatttaatatcatctttgatgtgataaagatctaatagacattttaagattaatgtatacaaaacacaactcttaattttattttccaaaaccagctttttctggttttggctcatcaaatgatatccagttgcttaggccaaaaacagaagaatcatcccggatttctctttctgactcacactcacatccagttcatttgcaaatcctgttagtctatcctcaccaactctgctttgctgctgtaacctaaaccatatcgtttcttgctcagactactgcagtagtactcaaactggtccctgttcccactttgcaccctctacagtctcttcacacaacagcttgagtaatattttaaagacataaattagggtatatcaaccccagctgcaaactatctactagcttcccctcccacttaatcaaactccacagccttaccatagtttgccagcccctggctacctctttggcttcatcttccatcaatttccccttgcccatgcaccttcaataacactagctttcttacaactgtttcaaagttctaagtatgttcctgcctacagcttttgtagttggctattctttgtgcctgtaacacacttttcatgtggctttctctctttattaagggctttatttttcctcatagtatgtatmacaaccaaacattgtattataaatatatgtatttgtgtacactagaatataagctctaggagggtagaaaactttgttttgttcactgctatgcccccaagaacctacaacttaatcaaagcagctctcacacagagtaagtactcaataagtgttggatacatgagaaaaatagagttgtaataggaaagaattctgtcattccagaaggcagaggtagggagagtaggtgttactgggcagcagaccttggcttagcggacagaaaagcttgagaaaaaatgaacagtacctgactctagaggatgaggctttgtaacgtagtgagttctctgttaccagaagggttcaagcagaggttggaaaggtcttgttctacagggaagctccatttgggtcatctcttaagccgtgttcacctatgttggagaagaaaaggcagagaaagaaaagcttgcattgattgattggataatagaggcatgaggtaatttattcacagatataatcatttaaggtcaatctgcaaaatgttccccagaaaaagataccaggtggcttctcacttcatccacactcaattccaggacaccagacaggcttgttattgtatctataaggaggmtttctgatttacagagggnagcagtcccctgattctcttgctgcactctggctacttgctgtctcctatcagatgatggatatagtccactggatgcaaatttactctgttcctgcatttcagcctttagatgaaagaacttcccagaaccacattgctcatccattctaaatcatattgaggcaagactgacctctgcctaggtttttaagctgtaaaggattcactgaaaggttattatagtatgatatattatgtgggatattcaaggaaaagcttcaaaatttttgaaaaaatttatatatgcatacctcagagatattgcagtctcattctagaccactgcaataaagtgaatatcataataaagcaagtcacataatttatttttgttcccagtacatgtaacagttatgtttacactatactgtagtctattgagtatgcaacagtattacatccaaaaaaaccttaattaaaaaatactttataactaaaaaatgctaatgatcatctgaaccttcagtgagtcaatcatctttttctggcagaagatattgcctcagtgttgatggctgctgactgatcagggtggtggytgctgactgatcagggtggyggytgctgaaagatggggtggctatggtaaattttattttattttattatttttatttatttatttattttgagaccgagtttygctcttgytgcccgggytggagtgcaatggcatgatcttggctcacygcaacctccgcctcctgggttcaagcgattctcctgcctcagcttcctgagtagctgggattacaggcatgtgccaacatgcccggctaactgtttttgtttgtttgtttgtttgtttgtttttgtttttgttttttgtatttttagtaaagacggagtttctccatgttggtcaggctggtcttgaactcctggccttaggtgatctgcccatctgggcctcgcaaagtgctgggattacaggcatgagccaccgcgcccggcccggctgtggcaaattttaaaactaagacactgaagttttccacagtaattgactcttcctttcaggaaagatttatttgtagcatgtggtaccgtttggtagcgttttacccacattagaacttccttcaaaattggagtcagtcctctcaaaccctgctaatgcttcatcaactaaatttaggcaatattctaaatcctttgttttcatttcaacaatattcacatcttcaccagaggagtagrttccatctcaagaaaccactttctttgctttttcctgagaaacaactcttcatttgttagttttattacgagattgcagcaattcagtcatatcttcaggatccatttataattctagttctttggctgtttccactacatctgcagttacttctccaccaaagtcttgaattcttcaaagtcatctgtaagagttggaatcaacttttttcaaactcctgtttttgttgagactttgaccgcctcccrtgaatcatgaatcttcctaatggcatctggaagattgtcaatttactttactcagatgcatcagaggaatsacaatttatggcagctatagctttctgaaagtatttcttaaataataagacttttaaaaattaaaattaccccttgatccatgggctgtagaatggatatcrtgttagtggacatgaaaacattaatgtttttgcacatctgcataagagctcttrgtgactaggtgcatcgacaatgagcaacaatattttgaaagraatctttttttctgaccagtgcatctcaagagtaggcttaaaatattcagtaaaccatgctataaacagacgtgatatcatccaggctttgcagtttcatttatagagtacaggcagagtagatttagcataattcttaagggctccaggatttggggattggtaaataagcattggcttccacttaaagtcaccagctccataaacccttaccaggagaatcagcgtgttctttgaaggcttggagctaggcattgacttctcctctctagctacgaaagtcctaaatgtcatcttcttccaatacaaggctgttttgtctacatcgaaaatctgttgtttaatatagttgccttcatcaatgatcttaggtagatcttctggataacttgctgcaacttctctacctcagcacctcctgcttcaccttgcactttcatgttaaggagatggcttatttccctaaacttcacaaattaacctctgctagcttcaaacttctcttctgcagtttcctcacctctttcagccttcacaaacttgaagagatttagggccttgctctgggttaggctttagcttaagagactggtgtggctagtttgatatttatctcgaccactaaaactttctccacatcagtgataaagctcttttgctttcaatggagtcacactttcaatttccttcaagaactcttcctttgtatttacaacttggctgtttggcataggaggcctagctttctacctacctcagctttcaacatgccttcctcactaagcataatsatttctagattttgatttaaaggatatgtgtgtgattactcctttcamttgaacatttggaggccatttaagggttattatttagcctcggggtcttggggaatagggtaagcccaagaagagggagcgagaacaggtaaggacatatttttggtagagtaagaacacacacatttatcagttaagttcatcatcttataygggcatattctgtggcaccccaaaactattgtgatagtaacatcaatgaccactgatcacatgttactatatcagatataataatcattaaaaattttgaaatactatgagaattaccaaaaaaaatgtgacacacgacgtgaagtgaacacacactgttggaaaaatggtgccaatagacatgcttgatgcagggttagcacaaactttcaatttgtaaaaaatgtggtatctgtgaagtatactaaagagaagggcaataaaatgagataggcctgtactatgtttttgaaagaatatttcactggaaagagggagcagagaaatcatacatatgaagcacctattgtgtaacaaatgtttagatcgttgccattygttaackttcaatgctgtgtgaagccttgtacatacattcatacctagtttactgaataagctggacttagtaaggtaaaagcagaaaccaacttcattgttttctctctgccttctcacaaacccctctaggaattaattcatccctccttttgatacaatctcaggcagatcatttattataataaaatctactcaagtctaatagtctcataagtttaacacggtcaaatgcaaaataaaaactatgaacccttatttgacttaaaatgtatccttttccccaaccttatcctgcttcaggccaaaaaatctacaacagagaagggaataagatttaattcttttttcaacctatttgcttcctatattcattttttttttttttttacctttctggaatagaggagagatgagagagcaatcatgggaaaagtacttagttttatgggtggtataattgtaatttagtttcaatacccttctggtgatagatgtataatctgcaggtcttwatcctttctggggcttttctgggttcatctgagttcctcctgctggcaaactcaagactatggttttccggatagaactgagctctcctcctgctgacaaaactatggttttctggatggaagcaaggcttcctttggatgaccacatttaactatctcttgtccctgagcttccactggtccacccctctattgagattcaggcagtcatcttgaatagagtctctttaatgagcaccccttgtcagtttccctcctctcaactcatatctaattcatgggaaacatacattttccctgttgttagaagaattccagctcctctccaatgcagctcccaatcttccttctgttttcaggtagaagaactctaaccttagtctatcacatattttttcaggaggaggcaactatctggatttatgatcctcgcaatctgggaaacatatcatgaattctgagtcaacccattgaacccctttctctaaacttgggttgaggagaatgcatccctctctcttcccctttaagrgagtacagataaaaatattgttaattcaatgttttccaaaggaattttctttttttagtttcttcaacttcaccttccataaaggtatgtgttggaggccatggaagggcattgatcagctaagactgacaaaacaagtttgagatcttcttttcaacttgtatatcatagctatttatagttctatgcttttgaatatgggaaaattgggggagttattcaaaaactctaaccaataggaagcattatatttaagatgccattttatgttaatttgttctttcaaacaatcctatgtggattgaggattttcctcaattatcagtaatgtaataatagtgtctacctgtaggattattatgattttatttgataattgaggaaaattggtcccagaaaagttaagttactagaaggtcatacaatttatattggtgagtgaaaaatacaccatctctgtcctgaaaacacttatttatttgggggagacggaaggtaaattaatatgtaaggaaacaaatgtgtgagagagacagatagataaagatacagatatatagatacagatatatgtgtatgtatgtgtatatatattacttgtaaattaggaaatgctgtaaggataaaagcagggtataatgataactgaaatgaacagaggtcaaggaaggccttttcagaaggtgatcattaaactgagtcattatgtataatatttccttaagtatgttgtttccttatgaaatataggaagagaacacttcatgcagaaataccaacaggtgcaaaagccccaaagtagaaaagagcatggtcagaacagagcacaggcctaaacctagtgaagtgtgagagaagttgcaagaggcatagctggacagataagtgggccagaagacaggcgagagtcctgggacctgccacttagagttgtgtggacttttattattattattgcttctcaaatatgcaatatgtatttttactgtattattcatatcacttgtttccctttcatckgtaaagctcatccactccaactaatactctatgatttatctctcttggaggaggagtgcactcccttcctacccatgtcccattttagcatatgaccttaaattttcgctcrcttttgagatttttttttctcatttctgcaaagagtgtgaatttcattaggacaaggaaatgtggatgatgtgtcctttgcttctgtatggtgagcattcaactggtaattgaacattgatcttatttacattaagatttggatagaagtagggtattaatctgagtataaagaagagattatactatcttttttattggtggtcagtgttttgaagcattttcttttatttctggcagactccacaattccaataggaaaatagtaactgattgagcttctagtttttaatcctgaaaagaaaatactaatttgaaaagaaatataggtataaattgctaatatactgcagtaatcctgtgtagagttagaaaaggtgccatatcctgacttttagatttacttactttataacagtaattgtttaaagttgatttgttcattcattcatttaatcatttagagcttattatataacagatattttgtaagaagatagagctataaagaaaatttttaaaaatttttctgaaattttcttcaagaggctcacaccctactgggaaagtagacatgtaaatagttagatcattttgagtactaatcaagaagagtgtcatagaagagacataaaagaaggagaggttattgctacctgggagaaaaggaaggttgaactgaggcttgaaagataggtggagattttccagggacaagaagtagtttggagaagggcactccagccaaaggaattttcatgaagcaaagaccttaataggcaggaggccatggtaaggagtaagaatgggcacatttaaattatatggcttcaagagagaattcatctgtaattggtctaatgataaaacccagcaaacctttttatcatgtgtgtttgcatctgttgagttctctgaaggttgtgaaaaaataagcctaccactcactcatgttcaaaaaaaattatttcatggttcaaggatcagtgttacagagtttcactttgagatgaatgtgatagagactagattgagttttgttttgttgttgttttctttcctgtgattaatcatgagcaagccaaatagtcaaaattcatattaataacctagttctcataactttgagaggattattaattcatgaatatgagatcacatgaaggacagatattatcaatacacacaaatcatgactctatatttgttcgactctctatgtcatgatcagagttttgtttgactctgtacattattatcatagttaatatttgaaatgaagagagattttttgttgctgttattgtaaaagcatagttttacaatgaggtcttctattttggtttgctctctctagaatacagtgataggtgttttkttttktttttttttaatctggacaagtaaacagaactaataagaaaatacattggttatactttyccactkgggaatgaattacagaatcagaatgttgtcactggtagattattggcagtcaattgtccttctgtacattcttatttctatttttagaaacaaaatcaaatatacaaacattttattgaaaaatgctctggaattttaaatagacctacattattttacaaatctttgtgttatggaaggaatatcactctgaactgccatgaaggagtaaaattttaaacatcattcttgagtctactaagtgatatccaacttttgctgaattaatatacaaagttaaatattggccaactgataaagatgagggtgagagttaataagtgaatggtaatatcaatcatttatcccaaaaggtgtttctcccgatgcatgttcattacttactttttgtaagtaatatgtttataacactttcatgtttaaagttgatttatccattattcatttaattgtctagagcttattatatggtagctattttgcaagaagagctataaagaatttttttttaaatttgtctcaaattttcttcaagaggcttcatgttttgatcattgtatattcattatgaaaaaatatgattgctcttacctttgtcttcactatcaattaagaaaagaatgatgagcacaagtatgatacatgtcctaagtaagcagcatatatgcacaaatcaaacatgagttagtagttgccaaaactttactgtaggagtggaaactctgcttttatttttctaataaaatcttaaccaaatcctatgtccatttaaagcaaagttactttaattgaagcagaagtgagagacctgaagccctacttagctacaaccctgtgcccttggggtcaatagttaattttgagtagtagttctatcccaccatctccaatacctttgttacccacagtggccatccctgtagctggggaacctcctagcaccccagtttattttagacccaccctaaaacccattgacacttgatttgaagagtaatataaaagaagaccgagggcctaaaaaatataataataaggaatataatagaaataataattctacagatataaaacgctttttgagctttttcttaatgccaaagttgtacacaactctttcatgcccaatttacagatggaaaaattaaaagatttaacaattttcccaagttcacaaatttaaaaaatagtgaattttgggatttgaacttaagcctgttagaatccaaagcctrtgttccattagatggattatttttggttaaatttcttccacattagcccactgggaatatggagtggggaaggttaagtgtgttcatttattcattgagtcaataaacaaacattaatttagttaggcactatatctatagatatataactataagtgtggaactgtaaaggtgattaaacagaacattatgtgtctttacagtacttatttataattctatcttctttaccaataaattatagacttaaatattttgcttatttctctgatcctccattctctgtaaaggttggataataaactatgcaagtcctgaagtctctttcagctctatgattttacaagtctaatcgttataaggccacagtattgtattatactaactacctttcccctaaaggagtctagtatggtcctaattccatgactagggtggtttctgctaaacacacaggtcttttccaaaccaggcacgactcctttaaatgcacagtatttgtgtcacttcagtgggaggtaaaagcctttactccccgttagctttttgtactatattataagctgcaaggtcaacctcagtagagttcattccttatgtcttacaactctgccttggtgcctctactattttcctccctccgtcctataacttctcttgctaggactcttcatgtcagcataccatcatacatctatgcacctcatccctcaaatcagcctactcatttcaatttcttctggaaataattttttttaagtttcagaagtagaaaaataaactaattttaactactttgttttattttgttttctttcctgtctgatccaaccctctcctcttctcttttttcttggaaacatgttgtcaatataagaatgcttacacaatttggctttggtcctttctttctttgtctggatgctgtttgactcataaatgctggcaaaagcaggagacagaagacaaaatatctgttccacgttatggtatatggtaaaaaatcaactgctttgtagcaccttgaacagaaaagtcagttataaatactttaataaaatatggtgtttgttatttttaggtttcaagccagcagagttgtaaactggcgtgtgactggagaaaaaggtttccattcatgtttctagaagaatattcacaatgagattttaaaagttttcaattcaaataaatcatgataccataataaaacatttattagtgagtatttctatatattcaaagaaccatattcaagtattcttaatttcccattgtattatgaggagctgatatggtttggctgtgtccccatccagatctcatcttgaattcccaagtgttgggggagggacccagtgggaggtaattgaaacatgggggcaggtctttcctgtgctgttgttgtgatagtgaataaatctcaagagatctagtagttttacaagggggagtttccctgaacaagtctctctttgactgctgccatccacataagatgtgacttgctcctccttgccttccaccatgattgtgaggcctccccagccatgtagcrctgagtccattaaaccattttcctgaataaattaaaaataaattgcaaccaccaactgacccatcaaccaacctacaactaaaaggtcctgtgaatgacaaacagatacactgaatagtctttttttctttcaacagagaaaactgggtttaactttattttttattgtcaactgacaacttmkaattgtataaatttatggcatacaaagtgatrttataacttattaacacaatgtggaacaattaagctagttaatatatctgtcacctcaaatacttaacatgccttgtggtgagaacatttgagatttagattttgaaatatacaatagtctattattaactatattcaccgggtttggcaatagaacccaaaaaaaaaaaaagaaaaaatatattccccctgtctgagattttgtactctttaaccatcatctcctcattctcctcacctccaccctctgtaaccaccattctactctctgctttgmtgagttcagttgttttcaattctacatataaatgagaatatagagtgtttatatttgctggacttattttgcttaacataatgttctccaattccatctatgttgtcatgaatgacacaatttctcctttttaaagggtgaatcatattccattatttatataaaccacattttctttatcagtttatctcttaatggacacttaggttgattctataacttggctatcattgtttccgtgaacatgaggtggctgatatctctttgactaacttcaaaatattttgtgtaaacaaacagaagtgagactgctggatcatatgataattctgtttttagttttatttatttgcctgtgatgctgctaggctgcaaggctgtatttcttctgttgaccctcaatctgcactaaagatgataaggacctttagttagatgtgtgtttctgagattattaactataggtcagagagtttgatgcattttttaccatatgagagagttaggaatgcagtgctttctcgtgccttcagatccctagacttctctttgcaggaaagcatgtattgttgacccttaaacaatgtagggttggggttcagataccagcacaattgaaaatccacatatcacttttgattcccccaaaacttaactatgaacagcctactagtattcattgacaggaagccttgccagtaacatagtcaattaacacatattttgtatgttatatgtattatatacgatattcttataatgaagtaagtgagataaaagaaaatattaagaaaatcataaagaagagaaaatgtacttggtgttcattaagcggattattgtaaaggtcttcatcctaatcatcttcacattgagtaggtaaggagaaggatgaagagaaggatttggtcttgctgtctgagatattttctggtaaataataaatagaagagtatatccctatattttatgcatttatgacatacctaactttatattaagtgtttgcaatatttctaggctatgcagttcatctgtggggtttttccaattgtcacaaatctccaaaaagttttccaatatatttattgagaaaccatctgcatataaatgggcctatacaatttgaacccatgttattgaatggccaactgtactattatatagagtagaagtagaaataaaactatttacttggctgtgaagccaagtaaatctaggttcaaatcctggcttttctacttgctactttagtgaactcaggtgatgtctttaaatattatcaagcttttataaaatagagataatagaaacaacattatctataggtttgttatgaagattaattaacccagttattgctcaatgtttgtctttattgctgttattaccaaatagcatgacttcgacttttgattatggtagctaggaaatcattaccagtcaatatcatttaggaaaatgttcaggaatcaacttattgaatactacatttaagaactgttttttgtttggtgatcttttatttcaaaacagtttacttaatttttggcagactatttataattttagtagtgaaataactcattgaatcttctagtttttatccccactccccaaagaccatgggtatcttcaggttggattgatagtatttttaaaaagagaaaaataaagataaatcaccattttttttgtatcctactgcttacatttattatctgctttaattctcaaaacaacacaagattaaaaagctgccttttcaaataacagctcttgctactacatcattgtttcccctccttgaatcctggattataacaggagagatttattgctccttgaggaattccattaacattttggctaccacctttgaaaacctgcttgtttaatatactttaacccctagatgtattttttaaaagcatgttttgcagtctacttcccaccacccyactccccccaaaaaaagtttctgatgtttcttcctccatttttctactttttcattttccaaaatattatctcaaaaagaaccgttctttcagtattaaaagatatgcttttgctcaaaagtcagataatgcaaaatgatttctgcctcactaacatttctttgttttctttggagaagagaatgaagaagaggtttttcctctcctgctagcagctgagtccttttgtttggctggcccagtgaggcttttgtttmtatagaagagagccctgttatttctcaaaagcttttgtgtgcaacacttcctcctgtgtttctgctcacccagcacattttgcaggagtaaatgtcaaaaagactaagtgttgttgagcttggttgtgttttatgatgttgttgttctccctacaaatctttttatgaacagagactgaattctgttgctggatagtggatgtgttggccattctggttttgtttgtttgattttggtgttttggggtcagagaaaaggatgccccgaatgtttttaacaagcttttcctgtgagtcctgctgtttctgacaaattcctggaatctgacagaagggcatctgtggatataatggtggtaacacttgaaagtatttttcatctgtaatggtgcctgcatygaaggttgcttctttcctgatgtgttcagtaagaagcggttgttttgtccaggtggggtgactcacacctgtaatcccagcactttgggaagccgaggcgggcagatcatctgaggttgggagtttaagaccagcctgaccaacatggagaaaccccgtctctactaaaaatacagaattagccaggtgtggtggcacatgcctgtagtcccagctacctgggaggctgaggcaggagaatcgcttgaacccggtaggcggaggttgaggtgagccaattgcactccagcctgggcmacaagagcgaaactccatctcaaaaaaaaaaaagaagtagttgtttttctcaataacaatgagaaaaaagtgaaataatatactcaggtttaaaaaattcgctaatatgtaacttatttccccagtttgatgttaccagatatcatccaatgtatctagacggcagtgatttctttctctacctggaattccacccacaggtactgtcatggactcatacttcctaagcagttgctgctgacaagcwtatcagagaggagtatcctattattagcagctgcttaaggaccagactggaagaagttctaagacctgtcagctccttctcttgagaactactgcagcagcacaaccagggtcagctctttcktcaagaataggttgaaacatgaacttttggggagaaagggcttataacagattgtaaatcatttttttttttctttctcagcttggtgaagttgaaatagtacaggtttggttgtcagattaggttcagttgctggatatgattcttatttgtacatgtccattaacatagaaattctgagtctcagttactttttctgtaagatgagaataacagtaataccaatgttaaagtgtggctttctggtttaagtaatgtaatagtatataaaggggctagaaaataggtactgggcacccagtagatattccacaaatggcagttcttattatatgtgttctagagttaaatactcatctctatagtccctccttctgtttctgtaactttctataccctttctatattgtttgctgatttgggacatcaatctgcccaaggcctactgatttaggaagaaagtgtgtgggcccagctctcttagtgttagggccacttaaagtagtatccatagtgaaaaagtcaccctctaattgccccagtaattggctctagcactttaaggctttgaaaattttataaccgaaagaacttcccacacaatcttttaatggcaatcgttctaatttacgggctttgtatgccgtcctgagagagctgaatggaagacattattgtgaaggggctatgcagatagcaatacaaatgtccttgcccacaaggcatgaaagacaaacactgaaaatgaaaaaaggaaaaataaccaagcagtacacttgcagaaataactcttatgacttcaaaacattaaaaataaaactgctttcctgtgtgtctgtccttgacagtgatttcatctttttagctgcctttcagcttgttttatttacagctgcgaaggatacaagccactgaatgaagagtacatkttctctttctcacattcaaatattacatgtgtgtgtataatattaattaaacatacagtggactcatttttatttatatacctgtttgtatgtatgtatgtaagtatgtagtgacaacatgaatgtatactgcatgtatatgaatatatatacacacatatcatctatatctatatatatttcgtaacatacacatattccttttctgtttcagtgcaagtcttcctcatgtatttactcaaaggcataaagaatacctaaatattaacaacttcaatatatacctggatttataaccttgatgtacaaaattctctgccttctcaaatccccttttcctttaatatcccaatttagagttcaagcccccagcttgaaacctccagtgcctcctcagcatttctcacagttgtctcctggccacctctagtcctgaagttccttagccatcccccacaggcaagttctccatgtgcttttccctgtagtccagaatctgccatcttcttcctctggcatgccctctctctgtgttagtttgctacagctgccataacaaagtaccacaaattaagtggcttaaacaacaaagtttgtgtctcatacttctggagggtacaagtctgagatcgagatattagcaaggttgtttccttctgaagactgtgagagagaatctgttccatgactctctcccagcttccagtagtttgccggaaatctttggcattccgtggcttagggatgaatcactcttctttctccttcggtcttcacgtgtcattctccctgtatgcatgtctgtttctgtgtccaaattttccatttattaaaacaaacacagtttcattggattagggaccactctaataacttcatcttaacataatcatcttcaaacaccctatttctaaataaagtcacagatactggagattagaacttcaccatcttttgggagaacaagattaaacccacaacactccctctctcaaaaaatcctccttacgtcttttcgctatgtatctaccagggaaacattcaaaattcatgatctgttattttgtagagaaatgtacctttctttgtttcacccttctagttcattcttggggcctattttgacagaattaaaattttcaatataaacttggacttataaccttgaggtcacaaaactctgccttctagaatcaccctttcctttaatatcctggttaagagctcaaactcctggaaatacatagaattttctttactaaaaaacacaaatacatgcacacatagagaatactgaacggcatattgtgtatgcattttttttaccattttgttattcaataaaacacagatacagaaaagcatacaaaatacatattgtttaatgtattattttatataattattatgagacaaaaatcctgtaactaccacctagaacaaaaatagaactttgccagctaccagaacacttctacatgcctattataatcacagttctttctctccttctgaaagtaaccactaatctgactttaaaagtagtcctttatgttcttttcatctattcctttatgttttaagctggatgctctattcctatatgttttcctggatacactattttagtcttgcccrttttttttttagcttaatttgtcttttcagtcttctttaatttgttgaattccactctatattttatttaccttatagtttatctgctgaagaactcaggccattagacctatatagtttgccaaatctactcatctctaatgtatacccataatatagttcaatatgtctctctctactctttcaaaaaagaaaaaaaaatggcagctggatctagaggtattatcagactcatgtgtgatccctttgctagactataggtgatggcacgcccttttataataaagcaagtaatattattttcacccttttttacattagcagccattaatgttcaattcttaaggtgataatatttctatcaattttgtttctatttattatctggaataattttgcaaagagccatttatcctcatttattatagttgtagagcttatataagaaaggcattgtaagtgattgattcttttttactacttacccagttctcaagataatgagttgtttccttgtcatcttgaaaggtacaattagttgtattattatgactattattaaaagtattattttgaactaatgaatttaaacataactgaaatgaacaaaaaatggattaaggaaaagtgaacagagcttcagtgacctgtacagtaatacctagcagtttaatatatctgtaactggatcctcactaggagagggaagagataatgaccagaaaaaaagaaaagaaaaaaaattagctaaaattttctcaagtttaatcaaaaacgttaacatacagatccaagaagtttcaaacaggataaatacaaacaaataaagcaaactactaccacaatggatatagagacactgcagaaaaccaatgataaaataaaagcagtaagagaaaacaaatgcattataaaatagagaaccagataagaattattcctgacttctcatcagaaacaacagagcctagaagccaattgaatggcatttttaaagagctgaaagataatatggaaagttaaagtgcttagaacagtgcctggcacatagtaggtactaaatactttttaagtgttgtaattattgttatgagctttattttcaatgttcttctttaagacgatagagaccactgagtgaatatggcatccttttcttagtacttaaaaggacaatataatgagctrctttctaaaagaaaatgtaatttttgtgtgaaacaccaggcccccaggtgtcatggtagctatttcattgatattattccaaaagagctagctaaataaatgaaattaaaatatctgcatgaaatttgtagctctctttattcaagcacacatatataaacttcactttgattagatacataatttgtgagatatttttcaaatatttgatctcagaataacaatttaaaaatggaaaaataaatgcattttcatttaaaagcttaataaagaattcctttccaattgtgactgatttaatttatatataacattggtttcaaaatcctctatgagtacatttttattcttctctttatttgtttataatcatctgtgaatttgtaggcagaagactatactttattatgtaatgcrttattcaaatagagtaatatttgaaaaggctatgcttatttacacaattttaaaaatacccctttttaaaattcattggctagttgttctctttgctcttcccagtttgaaataataattctctacaatgctgaactgacatacttgtttcctcaaactgccatgctatctctctccttttttttccttgaagtctttgcatatgctatgttctctgtgtagtactctccccaataccacactgggttggctcctaatcttccttcagaattcaacagaaaaagttacttccattggggaatactctcctctatgttctcaaagtatggtgtatttattctcatcattctgtttatttaggcaacatagtataataattaatactgcaaccttgactcagattctatgtaaatcttggttstactagattcttgctgtatgaccttgggaatgttttacttgatctcttgtcctttgtttcctcttcaacaaaataagaataataattgtacctatcttataaggtgatgtggcaatctagaaaaggttaacaatggaacaaaatagagaacccagaaataagaccatgcacctacaaccatctgatcatcaacaaacctgacaaaaacaagcaatggggaaattatttcttatttaataaatgatgctgggagaactggctagccatagrcagaaaattgaaactggaccccttccttataccatatacaaaaatcaactcaagatggattcaggacttaaatgtaaaacccaaaactataaaagccctcaaagacaacctaggcaataccattcaagacataggcatgaggaaacattttatgatgaagacaccaaaagtaattgcaacaaatgcaaaaattgacatatgggatataagaaactatcaacagagtaaacagacaacctacagaataggagaaaaattttacaatctatctatctaacaaagctctaatatccagtatctgtaaggaacttaaacaagtttacaygaaaaaaataaccacaktaaaaagtggacaaaggacatgagcagacatttctcaaaggaagacagaggtgtggccaacaaacatgaaaaaaaagctcaacatccctgatcattagagaaacgcaaataaaaaccgcaaagagataccatctcacaccagtcagaatggctattattcaaaggcaaaaaaacaacagctgctgatgaggctgtggagaaaaaggaatgcttttacactgttggtgggagtgtaaattagttcaaccattgtggaagacagtgtgaggattcctcaaagacctagggccaaaagaattcaacctagcaatcccattactgaatatatacccaaaggaayataaatcattctattataaagatacatgcacatgtaagttcattgtagcactattcacaatagcaaagacatggaatcagcctaaatactgatcagtgatagactagataaagaaaatgtggtacatatacaccatggaatgctatgcagccataaagaggaacgaggtcatgtcctttgcagggacatggatggagctagaggccattattttcagcaaactaacacaagaacagaaaaccaaataccacccgttcccacttataactgggagctgactgataagaacacatggacacatggggggaaacaagacacactggggcctgttggagagtggggagtggaaaaagggagagcatcaggaagaatagctaatagatgctgggattaatacctgggtgatgggatgatctgtacagcaaaccaccatggcacaccgttacctatgtaacaaacctgcacatgctgcacatgtacccctgaacttaaaataaaagttggaagtttaaacaaaaaaatgtaaaaggttaatacacacaagtcttagaaaagtgcctggcaatgatagtgctaagtcagtgagtgctaatagagctttcatacgtaatcatctttctacttggcacatgcttctttatatttagtgatcaactaataattatgatgtgaatgaattaagccatagtagcctctgcttataaattgtttgtaaaatcaatctaattaatatttattgagtactgagaatatgttttgacacttatttattgaataggtgaatgattaaatgtacaaaatccaataatgaatgctattctacaaaagtaaaggtgaaaaaatcaatgtgargtggtttctttgggaacaattttttggaagaaattaatgagtatctacaccaaattacgtatgtattcaaatgggtaaaccgaggaaggggactttccagaacaagaagtaacattctcgagggtggagatatgctgtgtagatgttggccttttttttatctcaaaactaattatacagaaaaaaaaaaaagtctgtatcaggattaggatgtaggcaggtgcacctrtgcaagaaacatcattgattttayattggattgtgaaagagaaagtacattgtaaaatcatgcctttcataacagcggattggaatgccctcttcctgatttattagctgtgggaacacaaacatgttgttgaacttttctaagaytcattacatgttaagttgtagtaatagttggcccaaggattaaataaaactatgcaggcaattctttcagacaatgtgcctggcacatggtacgtagtcaataagaactcatttgtgtaataggaacaagactagttgaccagattggtcagatacagagaagattctttaaacattttattttcatttaaaacattaatgtatattaaattgcctatttttatttaaaatggtcgccatgggtctcaaccattttttgtgaagaaaattgactgataataaaagacattgggaaagtaatatgagtgtccaaatacttctagactttgtttctcctcaacctttcataattatcttgcccacattaatagcatgttttaaacatttggtgtttcacaagcctttccaaaacattcaccttacattttatagaaacattaagatgagtattttatcacttcacaaaatatttaatcaaattacataattacagcaacagcaacagcagctgacataattaacaagttaaagggagataaatgggttaggtaaaaaactcagatgaatcttgataaatacacaactctactaggtatgtatacaattctatttggtaagtgtacaactctacttgtttgcagagcattgtgaagatatactcaagagcagctttctagccatgagmagttagcatctccaggtccagtcaagacagttatgagttttggttaattaaggaagtttttaactgaagtaggggagctttttttttttttttttttttttgagacgcagtcccactctgtcacccaggttggagctcagtggtgcaaactcagctcactgcaacctctatctccctggttcaaggaattctcctgcctcagcctcccaagtagctggaattacaggcgtgcaccaccatacccagctgatttttgtatttttagtagagatggggtttcaccacattggccaggctgatctcgaacttctgacctcatgatccaaccacctcggcctcccaaagtgctgagattacaggtgtgagccaccacgcccagctggagacttctgttatgtaatactactattgctgtaggctattaaagaggtcaaatcagttctattaactgaaatatcacttcaataacgttctgcaatcactctgatatctatgttcacataggaatttaaacatatttcataaatatagcacttctcactgatgctgcagttattyatttttccattctagaccatgagctcctcaatattagatacttgttctctttgtgaagcttgtccctagcccatagtaggtactaggagatgtgtagtatgaagtctagaagcttagtgccatgagaaaaagtagaagaaactaggtctgcttcacttagagcaaagaagataaggtggctataatagctggcttcaaaatctctgctttccatgtaactgagccaggcttttagctcaggttctgcaattaaacagctttgtaactctgagaaattacttcatttctggaggtcttagtttaatccctgaaaaattagagaagtaagacagatgatctggggaatcccttctaaaggtagttgttctacctatttaaagggacatcatttatagggacagacaacccagcttattctcttttcctttaaaagacagatctgagacctgttgatagaagtaataacatcatagccaattaattaatatagagaaaaaagaaatgttaatggttccaccttggttacagtgtatttaagtaaaggctagatgaccatatgcatggacctggagcgggtattcgattagattaaccccgagatcccttccaattataagattctttgactattaaatcaaagggccaaatgaagcaaaagtgctcaacttcctttttatttaacttttctgactgatcctgctttcctcctgtttattcacatgtgctactctacggggagtaatcttaaatgtacttttctccccttcaacctaaccacagactctgttttgaaactctgaatattttgacagtaaagcagaaacaagccacaatctcatagtctccctggtaaactggagagaatcccaactgcatttgccaactatattccaaagatttcagtagtaatgcctacatgcaatatataaatgccacaaaatgccaccatcgaatgacccaacagtggtcaaggtcagtggatgttggaagtctcaccaagttttccaaaggctattagagtaaacaggaagtcaagagtagcttgactccctgcttctgtcctactctgtgcgtttcttgccaaaaatcaggatctgtatttcttctgtcttacaaatagtacacaatgatctggagtacataaggacacttgcaaaagcctgagaccagagaaacaataactaaaatgtttcatgacagctactactgtattgtggaaattatttattcttagacataggttgataaacttcaaaatatrgcattagcagattttgttagtcttgaaaagcaagcgaactatccatttaaatgctaggaaatctgttttgttattttctatatatgtaagtctcacagagaatatcccattttggattttaatcagggtaaaaaacaatcttcatctagcaaactattgctccaaaatccaattrattgaaggattttataaacaatacaatccacattatatttttatagctttgaattgaaacacatgtaattttttaattttaaaaattaaaaaataaatgtgctatggacatgtatttctttatttgatgaccagaaaacattagcactaaagggtggtagtgttttttagtgccaaggttttaactctcttgtactcatagagcatagcatggtccaaatgctatatttggccacattcattgtttcatttcttaatgggcaaagctgtcactgaaggactaagctttttccttaccctcagaaatgtagatccagattatttttattattagatgcagagctttgacttagccctagaaagtaccctgaattataactgacttaaaggagtaaaaatgccaactgacaataatgagtcttctcacaatctgtaacatttagaagagtaaagctggtttttcttgttattaattaattaattaattwatttatttatttattagagatgaggccttactctgtcacccaagctggaatacagtggtactgtcacaactcactgcagcttttacctcccaggctcaagtgatcctccagcttcagcctccagagtagctggaaccacaggcacatgccaccacacctggctagtttttgtatttttttatagagacagggtattgctattttgcccaggctggtctaaactcttgggctcaagtaatcctcctacttcagcctcccaaagtgctaggattatgagcataaaatgccatgcccagccaagctgtctttatttaattggcttattgtatcctttaaatacacatttaaagtaatattaccaaaatcaacatttttaagttcactcaacctgttttattttttattttttatagtggccaaaaagatttttcatgcttctcaaagtaaataaaataattttaaaagcttataagacaagaggaaggagaaaattacatagtttgtgattagaactaattcgaaatacaggaaagtaattgcttagaaattaaagatgatttttaatttggtcaagtgcaaagatttgataatgcaagagttgtatacccagtttacacattaaaattaattgatcgactcgagacttcagcagccactgtctagtgcaaagacacaagcacataattaatgataataatgctcaagtgtttacatcatgtcagtaggtattttgattgctctcattttgctattggtatcaaatttaaaactaaacaattccttttaataattatgttgtcatacttcagttggtacaatatttgagaaaggagctaggacttttcctagcatatcaacttttggttttattaaaatgcacacatcagccagactcagtagctcatgcttgtaatcccatcaccttgggagacggaggcaggaggattacttgagcccaagaattcaagaccagcctaggcaacatagcaagaccctgtcattacaaaaaataaaactaaataaaaaaattggctggggtagtcgtatgcacctggagtcccactgacttgggaggctgaggcaggaagattgcttgagctcagaagttcaaggttacagggagctatgattgtgccactgcactccagcagttagatccggtctcaaaaataataataataataataataatacaattaaaatgcatggatcattcattttatcattcaaaataaatgtcagtggtcatgatcatttatgtcattctcagaaatctttatatagatctaaaatttagcaacgtgtgttacagttaaatatgagttctagctgatgccggtgtgagaaatattagtattttcatactatttagattttttcttgagatatattttaaattcatttttattgtttctgctactaagattagtatgtatttgtagaatgcttcagagtttgtgataccagaacacagtgcacagactgggaggctgaatagaacaataagcttaggaagaaaggctttgctgccagacagtcttggattcgcgtcttggcccacaggttgttaaatcattgaccttaagaaaactacttaacatctttaatctttattttcttgtttgtaaaatgttataatacctgcctcattggttttattttaatgagatgaaatgagataaggcatagtgaatgaaatgtaattttctttgtacctagcatatagtaaataataaaaacaatcattattgtccctcatttaatattgttatctcattcaatattattttctccagagaataacctttaaaactccacactgcacagcatcaaactagacagaagtattaacttggtcacccacccaagggcccttccctccttcactttagctgttctctgctcacccttgtaggaatcaaataaaaactcacttttgataaaaacaaataggcagcttagcttttccttgctaaattcacccttcaagttatacaacctcattattgaagaatagatcagaaaaaaaatcataccatataaagaataggaagcatacaatatgctcattttagtatgtgagctttagaagcttgagttagcatctttatggatatatttctgcattttcacctctagaatcatttcctataggtttggggataggttttgtgcgatcgaaggtggtgtttgtttgttttgcatcttgaatgccaaaatatcatggcaaatgtgagagggatttatatcttaacatttcgaaacttctaggcatattccaacttaaaattcctgaatcaggaccaaaatggyatactattagtcctatacatgaagtaaaatataagaaaccatagttaaaagctagaggaatcaaaaatctaagatgctgatacaaaaagaaaacagcagcaatcttgatttgtttattcatcctgttaacagatatttattgaaagtctagtattttctaggtatggagcatcaagaagagaggtagtttgagtagtacatgcttgattcccactctaggtcaaaaaacaacaacaamaaaaaaaaaaaacaagaaaaaatctgtagataaagacagacactagatgtaactgcacaaagaagagagtgatccacctaatgacaactgggtcatcccaggaactcttatttgaatggtcccctattcctcctagatctattaatatagtactccttgttttacctctacccaaaggatcaaatttgttttagatcttgttttgcctctacccaatgtgcaaatttatttttgatatgtatgaattcacctgacttcacttgtcagagctttttttcttctttttctttttacccttctctctctmttatcaaaatacctgttgtggatatttttgtatgtctgtctctctagtcttctccaatatgcttattaaaagcatttgatgatcttttggaaagggaggaatgttctggaacagttcttaaaccaaatttccatctgtcaacagctgtctgaatagagatacataccaaaattaccaaaactccatctcmaaaacatgtgagctaactatatcaatcattgagataacttcatacattctgttacatttggaattgtgctgcaaaagccaaacattgcatattaattaaattgtatttatgtccatatgaaactgatagagactcttaaagaattcacaatttaagcataaggtagagtaactggagrgagttcactaagaagatgatacaagagtatagggttttatacccagatctgtaatttgtctcattttatttcatgggattaaccaattatgaggataaatgaaagtattttaagagagtttgagaaataaaatataagagaatagatgatgtgagtgaccatgatatgacatagttttgtgtgtctaataactcattttatattctagtattttgctttagatattaataatacctaaamtttaaataaatgtaaatggttyaaagtgtatgatgtattacattacatttgtctctcattacaatcttgaaagaaaatgcaaagggaatagatatcctttcaatactggaacttatactgtgtggttccttctcatacattatcataattaattctcactgtgatattatgaggtaagtattagcctccttgatatcattttcctgataaaactgattctcagagaagctaaacaacatattacaaggtcatacagtttttaaatggtagaaccagggattataccagtaatctttctcctattccacatggtgcttgtgtcatatattatctctttacgtattagaaaacagatccattaaaagtgacttgttccaatagtccatttattattttagcatgcaaaatattatatcttttaagcagtcattaaagatgttcaattatgtagctgaatttatttgtgtaaattaaactaagttgggcaaaagtataagattaaataaagacaaaaggtacatgctataagccttgtacaattggatatgcaagataggatagattgttctaaagattaatggatttgatataaaagatatttagttgcaataaaatagattttatggcaaagtaaagataccttaactcaactgctgtgtaattgaaaatattaacacttgtcacataatataatgagggagcatctgttacccagtggtttcagacaccttctttggcatgtctgaaaccatacaataaatactggaaatattgtttagttacttcataaatctgaaccrtaatgagtaagccctctgttgtttcatagtgagcaagatgtccttgcaaaaagaaatgcttgtataattgtttcaattacataacttccactctttcctaggatgcaagctgagtccagattttccaattatctcttttacaaagagccctataagggtgatcgagtgaggtagtaaagttagcttctactaataatgcccacttgacagttttggtgaattaaaatgtttataaatttttaaatttaaggttagtcttttagtttcttagcagattgcagacatcttttgtgttatattttatttttcacaatttggttttgtgaagaagatatgacaaacagtcagtgttgggggaacaaggaaaagctcaaagtaaatcatgagcagagagaaaattgagggaaaaagtctcctagastgagtttttaatgagtgattactgaatatagtaaagaaaaaaggcaaatttgagaaggaataaatgatgctttattataaaaagagaacatattaccaatgacacagaatataatttgccatatctttattgatacrtaatattttacatctttatggggtacrtgtgatattttgttacatgcatagaatatgtaatgatcaaagcagggtatttgaggcatccaccactttaagtatttatcgtaaatacttaagtattaaatacttaagtatttattgtaaatacttaaagtgttaaatacttaagtatttatcgtaaatacttaaatacttattctgtgtgttgggaacaattcaaktcctctcttctagctactttgaaatgtacaatacattgtttttaactatagccactctactctgcttttgaacaatagaacttatacgtttcatctaagtgtatttgcacccattaacttacctctcttctccccaccaacctttcccagcttctagtatctgccaactttttagctcccacatgtaagtgaaaacatgcaataattgtcattctttacctgcttatttcactttatataatgaccactagctctatcgatgttactacaaatgacattttatttttttctacagccaaataatattctgttgtgtatagataccacattctcttcatccatttattcattgatggatacttagattgatttcatrtctttgctattgtgaatagggctgcaataaacatgtgagtaccagtatctatttgatatactgatttatgttcccttggatagatacccagtagtgagattgctggattgtatagtagttcttttttagtttcttgagaaatcaccatactattgtccatagtggcaaatggctgcactattttacattctgactaacagtgtatgagttccctttgtctccatgtccttgtcagcgtccgttattttttgtctttttaataatagccattctacctgggataagatgatatctcattgtggtttttgatttgcatttctctaatgattaatgatcttgagcatctttatttgaatgtcatcttttgagaaatgtctattaatgccctttgcccatttttaatgggattatttttgttgttgttgagttgtttgagttctttgtatgttctggatattagtcgcttgtcagattaatagtttgcaaccattttctcccattcaatttgttgtttcttccctctgttaactgtcttttctrctgtgcagaagtttaatatagtccaatttgtttatttttgttttagttgtccgtggttttaaggtcttagccataaaatctttgcctagattagtgtcatgaagtgttttccctttgttttcttctgtgagttttataatttcaggccttccatttaaggctttaatctgtcttgagttgatttttgtatatgatcagataggggtccagtttcattcttttgcatgtggatatccaatattcctaggatcacttattgaaaaggatgtcctttccccagtacatgttcttagcagctttgtcaaatgtcagttggctataaacatgtggatgtatttctgacttctctattctgttccattggtctaagtgtctatttttataccaatascatgcctagtaatatatttctaagtcaggytgtatgatgcctccagctttgttttttgtttgtttgtttttgtgttttgttttgttttgttgtttttggttttggggttttttggttggggggatttttgttcgtttgtttttgctcaggattgcttcagctattctggctctttttttttttgattctatataaattttagaattctttttctcatttctgtaaaaaaaaatgactctggtatttttatagggattgcattgaatctgtagattgctttgggaagttagctcattttaattatgttaattctttcaacccatgagcatgaaatgtctttccatttatgtcctctttaatttctttcatcagtgttttgtagttttccttgtagagatctttccctttcttggttaaatctgttcctaggtatttggtttctgtaaccattgtaawtgaaattgccttctgaatttgttttttgactattattgttktacagaaatgctactgattttttatattgattttgtatcctctaactttactgaatttattagatctaagagttttttggtgtagtattttgtgggcattcttatcttgttccagttattagagagaaactttcaacttttctccattcagtatgatgttagctgtgtgttagtcatatatggcctttattatttggaagtatattttttctctgcctagcttgttgaacatttttattatgaagtgatgttcagtttttcaaatacttattctgcatctgatgagatgatcatatgattcttgtgcttccttctgttgatgtgatatattatgtttgttgatttgcatatgtaaaaccattcttgcatcccttggtataaatcccattttgtaatggtatattatctttttgatgtgctgttgaattcagtttgctagtattttgttgaggattttttgaagatgtgttcgtcaggaatattcatgtatagttttcttattttgttgtgtccttaggttttggtatcagggaatactggtcatagagtgagttagggagaatttctttctcttcaatttttatggagttgtttgaggaggattggttttagttctttttatgtgtggtggaattcagcagtgaatccatctgatcctgcactttattttactgggagactttttattactatttcagacttcctacttaatattggtctgttcaggttttccgtatcttcctgactaaaccttggaaggttgtatgyttccaggaatttatccatttcctctactttttccagttttttatcacatagttgttcctaatagtctctgataatcttgtatttctgtggaattaatatggttaggctttatgtccccactcaaatctcatatttaattataatccatataatacccataatccccatctgtcaagggagagaccaggtggaggtaactgaatcatgggggtgttttcccccatactattcttgtgatagtaagtcctcatgagatctgatggttttataagaggctcttccccttcccttggcactgcttcctgccaccttgtgaagaaggtgtctttcttccagttcaccttctgccataattgtaagtttgttgaggcctccccagccatgctgaattgtgagtcaattaaacttctttcctttataaatcactcagtcccagacagttctttatagcagtatgaaaatggactaatacaggaaaatggtaccaggagtggggtgctgctataaagacacccaaaaatgtaaaagcagctttcaaactgagtaacaggcagaggttggaaaagttttgagggctcagaagaagacaggaagatgtgagaaagtttggaccttcctagggacttggtgaatggctttgaccaaaatgctgatagtgatatggacaatgaagtccaagcttaggtggtctcagatggagatgaagaacttattgggaactggaataaaggtgactcttgctatgctttagcaaagagactggaggcattttgcccctgccctagaaatctgtggaagtttaaacttaagagagatgatttagggtatctggtgaaagaaatttctaagcagcaaagtgttcaagttgtgacctgggtgctcttaaaagcattgagttttacgcattcacaaagagatagttcagaattggaacttaagtttataagggaaacagagcataaaagtttgaaaactttgcaacctgacaatgcagtagaaaagataaaacaattttctgaaaagaaattcaagccagctgcagaaattttcataatgaacaaggaaccaacgttaatcaccaagacaatgggaaaaatgtctccagggcatgttggacatcttcatggcaacccctcccatgacagacctggaggcctaggagaaaaaaatggtttttgtgggcaaggacgagggccttgctgctttatgaaatctctggacttggtgccctgcattccagccatgagtaaaaggggccaacgtagagctcagaccattgcttcagagtatgcaagccccaagccttggcagcttacatgtggtgttgagcctgtgggtacacagatgtcaagaactgaagtttaggaacctccacctcgatttcagaggatgtatgaaaatgcctggatgtccaggcagaagtttgctgtgggagaggagccctcatggagaacctmtgatagggcaatagggaagggaaatgtcgggtgggcacccccacacagagtccccactggggtactacctagttgagctgtaagaagagggcccccatcctccagaccctaggatggtagatcccagtcttgggmagttatctatagcagtatgaaaacagactaatgcatgtatcaatggtcgtgtctcctctttcttttctgattttgtttatttaggtgttctctcttctttgctattttaggtggtagtttatcaattttctctttytgaagaaccaatatgtcattttgttgacccttatattgttctttaaacctattttgtttagttctactcttatctttattatttctctatttcggttaatttggggatgggtttgttcttgcttttctaattgcttgagttgcatttttagattgtttatgatgtttattgctataaaattccctcttagtactgcttttgctgtatcttacagattttggtatgttgtattttcattttcaattgttttaagaacttttttgattttcatcttaatttctatgttgacccaatgattatttaagaacatgaacatgtttaatttccatgtacttgtatagtttccaaagttgctcttgttattgatttataattttattccatgtgatctgagaatatactcaataagattttgattttttaagttgttgagacttgttttgtgacctgacatatctactatcctggataatgtttcatgcgctgataagaacaatgtattctgcagtcatgtgataaaatgttctgcaaatgtatgttaggtccattttatctaaagtctactttaatgtttctttgttaattttctgtgtaaatgatctgtctaatgccgagtgggatattgaagtaccccactattattgtattagaatctatctttctcttcagaactagtaatatttgtattatgaatctgggtgatccagtgctgggtgcatgtatatttagcattgttacattctcttgctgcattgattccctattatcattatataattttctgatttctcttttttactgtttttttttttttacttgaagtctgttttatccaatataaggatmgctactcttactcactttkggtttctgttattatggaatatcttttttcatccctttattttgtgtcttcatgtgtttttataggtaaagtatgtttcttataggcagcatatagttggatcatgtttttgtaacctttcagccagtctatatcttttaagtaaagaatttaatctgtttacattcaaggttaatattaatatatgaggttttgttcctgtcatattgttaattgtgttttggttgttctgtatgttctttgttcctttatttttcttttattgttttccattttggtttggtagctttctgtcatgatrctatttgasttctttctctttttcctttgtatrtgtgctttaccagtgagttttatacatttgtgtgttttcataatggcagatgtgtccttttccttccaggtttaggactcccttgagcatttcttatagagctgktctagtggtgttgaatttcttgtttttgcttctttgtaaaagactttattttttcttaatttattaaggataatttttctgtacatagtatcattggctggcagtttttcttttgaaacttttaatatatcattgcatttcctcctgcccggtatggtttctactgagaaaccaattttagtctagtggagattcccttgtaggtgactagacacttttgatgctttttgaattctttgtctttgactttagacagtttgactgtaatgtgccatggagaagatattttgtggattgtatctgtaaggatatctcagagcctcctgtatctggatgtctaattatcttgctagacttgggaagttttcatgcaatattatgttaaatagtttttctaaccctttcatcctttcttcatcttctgagaccctgattatttgaatatttggtccctttatggtgtcccatgtgtcatgaaggctttgctcattctcttttcttcttttttctttatttgtctgactggtttatttcaaaagacctttcttaaagttcggagattcttcttcatctaatctagtgttgaagctttcaaatgtattttctgatatattcaatgaatttgtcagtttcagaatttctgtttggttcttttgtatgatatctatctctttgataaatttgtcattcrtatcctgaattgtttttctgatttctttgtattggttttcataattctcttctatatcactgagattctttagaattgataatatgaattcttttattgatttactcatgtttctttttgcttgggatctgttactagagaattattgtgtttctttgacattatcatattgagttttttttttaatgtttccagtgtcactacattgatatctgtgtgatctggtataagtcacttcttctcatttttttaatttgcttttgtaggggattacttttttcctgaagatgtatctatggtgttggttgtgtagggcactttggctttgattcttgttgtgtgcaataatgtagtctttgtatgatttttcttttgactttaaacagcattatttgcatctgtgatttccttggtggtgtacagtgcagttataagtggaggatacgatgaagttctactggggagtgggatgccaagcagtccaatctttgggccccaggggtggcagcagtgagctgagcatgtctgttcttgagccccagtatactgtatggttacactaatgttarggggtctaggtgggccaattcttgggcctccagttgacttattcagtgtcagtagttgcagcagtgagccaggcaggtgggcaggttattaggcccctgggaacttggcatggcatggacaatggcartgatagtggtaggacaaccctctaggtcctgagtggtatacactggcattggcagtggctgtgatgggctgggctagccagtctccaggcccacaggtggtacatgcaggtaggtgccagctgaggagtaagtggctggctaggtagacccaatctcaagcacatgggaggattttttcacctaccaatggtgatagactgggctgggccctggcccagagggtggaagaagggacaaagccaggccaggcaggcttgtcctcaggcttcctaatggtggatgccagcatcagctatggtaggcagaggtgtcatgattcccaggccaccagcagaatgctcaggtgtgactggtagtagccacactgctgtcctgccactgtggaaggttggactgcwggcaaggcgggaatgtttacatcactcatgcctcatccctggcagcactcatgcctcaattcttgttgtgatagccactaccttacttatgcttcagtccccaatagctgtagttcatgccttgttcaggaactacatgcctgagccctggctgaagtagcccacaccttccttatggctcagacccagggattacagtccacaattctcttgcaccttagccctggcactgctgggttccagggcagtacacagactgttgggggcaggactctaaaacggtggcttgctgtagctgcttaggtgtcacagagtgtgtaagacccagtgcaacctcccttcttggagcagtgccatcacagaatttctgcatagatccttatgttagtttcaggacccacaagagttgaggggttctcccatgtctaggattgcaggagtccacagtgggaatgtggaccactaaagatgtctcatttatacttctcccatattgaggagtctctcatctcccagctgatcctggtcaagcaggatgccttgcttcctttttcttctttgctttaggtattttgtgtcacttttctgttgaatttattacattccagtattttctcttcagggaactatacgaagtgtgattatctactcactactttggttctttggtgtggaggagacaagtacaaaactcctctagtcagccatcattaggctgctcctratttgatgtattttttatttattttataacaaaaatattttatattgctttacagcaagccaacaacaaacaaaattgaaaaattataaacatgacacttctaaattctcaaatggaattccaagaccagagtgtgctcctcctccactttaattgtattcctttctttctttttttcttttttttgagatggggtctcactctgtcgcccaggctggagtgcagtggtgggatctcagctcactgaaacctccacctcccgggttcaagtgattcttcatgcctcagcctcccgagtagctgggattagaggtgcacaccaccatgcccagctaattttttttgtatttttagtagagatagggtttcaccatgttggccaggctggtatcgaactcctgacctcaagtgatccacccgccatggcctcccaaagcctgaaatctgacttctggcaagtacttcaatattctcagtatctaaaattgtcacctcttctttcctgataaacaatttgggtttcctgtttgtatgagggactatttggcacacctttttttttttttttttttttttttttttttttttttgagatggagtcttgctctgtcacccaggctggagtgcagtggcaccatctcggctcactgcaatctccgcctcctgggttcaagcaattcttatccctcagactcctgagtagctgggactacaggcatgcaccaccatgcccagctaaattttttgtatttttagtagagatgggatttcaccatgttggccaggctggtctcctgaccccaagtgatctgcctacctcagcctcccaaaatgctgggattacaggtgtgagccactgcacctggtcttatttggcatagtctttacagtttttatcaggccaagttaaaggctgactacattttctatcataaagaaagaagtagaaataaggcatgaggtgctgtgcattgttggacctagaatgattttcttgacaggtctttttgtgaggtttgtagaaagaaaaatgtgttaggtgcttaaaagtgcccatgatggtcacttgaaatgtgtagtaatagaatgcctgaattgagcataaaaggtttttaaatgtatagtcagaaataaggcagtaagtctgataatagtttttcacccytttaagtatttttattttttatttttttttttacttttagtttttgtgagtayatagtagttatatatatttacggggtacatgagatattttgatacaggcatgtcacgcgaagtaagcatatcatggagagtgggatatccatcctctcaagcatttatccattgagttgcaaacaatccaattatactctttttgttatttttaaatattaagttattattgactttacttgtctttttggactatagtaggtcttattcattctttctatttatttgtacatattaaccatccctacttcccccaccaagctccctgctacccttctcagcctctrgtaaccatcctttactttctattgtatgtccatgagttcaattgatttggtttttagrtcctacaactaagtgagaacatgagaygtttgtctttctgtctcttgcttatttcacttaacataatgatctccagttccacccatattgttgcaaatgactagatctcattctttttgtggctgaatagttctccattgtgtatgtgtaccatattttctgtatccattcatctgttgatcgacacttaggttgcttcaaaatcttagctattgtaaatagtgctgcaataagcatgagagtgcagatatcgcttcagtatactgatttgctttctttcggtagccataagtaggatcgctgaatcatatagtggctcaatttttagttttctgaggaatgtccaaactgttctccatagtggttgtactaatttacattccaccaacagtgtacaagggttacctttttcccatatcccagccagtatttgtcattacctttcttttggacataggccattttaactggggtgagatgatatttcattgtagctttgatatgcagttctctgatgattaatgatgttgagcacctttcatatgtctgtttgctgtctgtctgtcttcctttaagaaatgtccattcagatattttgcccatctttttatcatattattgktttttttcttagagttgtttgagttccttacatattcttgttactaatcacttgtcaaatgggtagtttacaaacattttctcccattctctggactgtctcttcactttgttgattgtttcctttactatcagaagccttttaacttgttgtgatcccatttgtccattaactgctttgattgtatttgcctgtggggtattgttcaagaaatttttgcccaaaccaatgtcatagaaatcttccccaatgttttcttagagtagtttcatggtttcaggtcttagatttaagtctttaatsccttttgatttgatttttgtatatggcaatagttaggggtctagtttcattcttctgcctatggatatccagtttccccagcaccatttattgaagagactgtcttttcaccagtgtatgttttggcacctttgtcaaaaatgagttgattctagatgtatagatttgtttctgggctgtctattctgttacctttgtctatgtgtctgtttttatgccagtatcatactgttttggttactatagctctgtagcataatttgaagtcagggaatgtgattcttccagttttgttctttttttcttaggatagcttgatgtattttttaaacaacagcaagtattaacaaggaaaatggagggagaccaaatctgatcaagtcattttcatggttaaaatttttcaaagtctctctcctcattgccactaatataaggtctaaactttttaacatggcacttctggagcctcatgagcctctatttctacatgtggacttgcacttgactgtcattatctcctggaagttcagaagttttgcatgatacaacctgcctttcttcattttttccaatgtactaacatatgctgtttatttataattctttccacattggtctgtgaaatccttgacaataggaactgcattctgttcatatttttgtttcccagttccagtattatgagttgaattgcgtccctgaaaaagatgttgatgtcttaacccccattcctatgtatatgaccttatttggaactaaggtctttgctaacggtcaagttaagatgaggtcgtactggtagactctattccaatatggcaagtgtctttacaaaaaaaaaaaaaatggacacagaaacagacatgcacatagggagaattcatgtgaagatgaagactgagatcgggatgatgcatctatgagataaggagtgccaartactgccagcaaatcaccagaatccagaagaggggcatggaatagatttactcttatagctttcaggaggactcaaccctgctaatgccttgatcttggtcttctagcctgcagaactttgagatagtaaatttctgttagttacgatgcttactttttagtactttgttattgcagccctaggaaactaagatagcctggaattgagtgttgttttaatgaatgatgaagtagctcactgcattattttaccccgatccctttcttgcatggtttgttaaagtatgcttatggaaaaaagatccagtgatttttatttagttcagtaattcattttaaaaactagttttgaagctgggtacagtggtgctcacctatagtcccagctacttgggaggctgaggttgggggaatsccttcacctcagaagtttaagtccagcctggacaacatagcatagacccctgtcttttaaaataaaaataaaaaattagttttcaagtatctactttgtccataaaacccctgggcatacaaaataaaagggttattttcccctccaccttcaaagtggtaactatccaacgtgggggaatgagatattcctacaacatatttgtgcatatcacagcagttatttatggcagctacgtattgtgattagttggtgttcatttcataccagctgttaaatgttctaaatatcaacccttcctataaataactatattctaattctatgtagaaaatgatgtatcactaaaaatragataaagacagataaaccgttagatgtggtcagtggagagagagagtacttttaagttaaaggagtggcgactaggaggaagaacttttcagaggagatgttactgaatacaggcgtttgtgaatggaaatttttcaagatccaccgagttacccttcagatatttcagcttgctttctccagcaacaaccctgccagtgggacatcctcatcaaacttcaacatgtgagatgatttttacatcttttaaataatctatgtaacttttgtggctttgtgtgctggaatctgtatacttccaagacagtgtagacagtattcagaggtcagtgtttaatgaccttggtttgcatggcagcaaaaattaacttggaaaaactgcatagacagatgtgcttgatagctagaggcagtgcctataatttggttatattttaatgatggaagcttggaggatattccatttcaagtgtaatgaagtagtccataaacaagtaggacagcatctaatcacattctatcatacagccccataagcagtcaacttgtggtttgactatttgatctttaaggatgaaaacaatttggtcaatgatagttctttgagtaaagaaatgtaattgtgtctgtcattggtcatttttaatgttcgtttagggaagagactgacatactcttcattaattcttcaccagccaatatagtagttggcacattaaaaatgctcaacatatactttttcccccttgagctaaagcaatcaactaaagcatacatatctttcttaatgtaggatgcttgacatttgaaagtatacctatgagatgtgaccatttggtctttgaacaatttagtcattaattatttctgcaaatatttattgaacaattactatatgtcagcactgtgctaacatagtctattttgtgcaacccctactttctaggatcatataattttgttaaaaaggaaagattagtgcacataagagattaatatgtaaggcaattcaatctaactgcctatattttccatgcttatatctagacttctgagaattactggaggaraaaaacctagaacagtgctattattaatctacagtctccaaaccctcactagacaatcaacacagctctttgccattttatgcaattctctaagcaattatatcttccattttccctaatagctattccaacacatctgtgatttcttcattctctgacctcactacttccctcattcttggttgatgatcatcctttcttgttaccmgagtaaatggaagatgagaacttctttagtgtcctgttattatcctacaatcttagcattcatctccactgtcctttcctccttttctaattcagtggagggagtgacctcttatcttcatttattcacttattggatacttggatatttmttgatatccaagtaccaagggctgaatgwacattaatggttctacagacatggttctacagtcatggttcttttccttgtggagactgcactccgcctaaaactacttattactttcacctaaacatttctgagtttctcaactaagccatgttatctctcaatgctgggtctttgagtatatatttccctctgcagggatgatgtctccccactcccttattttcttggttcattgttatcttccaggtctcagattgcatataatgacctgaagttatccttctctgacactaccccctctagcccaaggtaggccgcccacctatatgctcccatagccactattcctctcatagcagcacttaccacactgcattttcatgatttttatacttgtcctattctgtagtagaaaataagctgcatgaggacaagaacactagatctctaatttattgatgtaacaacaatatttaggctgctacttgacacataagtagtcatcagtaagtgtttaatgagttaaatagaggaagaaaggctggcacaggttagttctactggagtacaacttagaaatgcragagtttgttccacgcttcttccctagcttttagtggttgcttacaatctttgatgttccttggcttacagatttatcattctaatcrctgtgtcacttaccacataaattgctccctgtgtattttttatttctgtgtccaaatttcctcttcttataagggcaccaatcaatggaccctaatcctaccctgatccaatataacctcatcttcttaagtcacatctrcaaagaacttctttccaaataaggttaattacattcacaggtaccaggagttagaacttcagcacatctttctgggggacatagttcaacctataacagatgccatgtgagtagattgtggtgtatggggccagatggatgggattaaggatggtttgtaatatagaaatagaggtggaactacagatcagtgtctaaaaacttcagttattatggtaaggaggctgtggcaggttgaagagatcttttcaggacaggacagaggaatggccaaatccataaaagaagaaaagcattgaggctaaggaactgaatactctagagagagagagagaaaaaaagaaaaaagaaaaaagtaaagccctaacgtgcaggggaagatttcattttacaaaagagaaataatgtttcttcctttgaacaaagggaaagcagaaaggataggtatagaaatgtgaatttttcagaataaaataggtattaaagcaatgtgctaaaggtatgagtgggtattacaagatatgtaatagaagaaaaagttttgggctgtggctatagtaagttaattgggtgacytgtgagcagttcttcaagcaggattgaagatgctttgtcagtgccttagaaattttaagcagaatcacttctttcaacctcagattttgtctttggaatccagagaatatccaaagagtaagaagataatgctttggcttttaattaaccatattggcagtcgccagtgtgattaactactctctcaaattaaaataaaacatacttttttttggtatttgttaaagcaaaattttctttctaaaaaggaagagatgacaagtagtctctcatcagtgtagaccagttcctacagggaagggtttttttgttgttttttagctgaaacttatgcacattcataagttaagttgcctgtgagggtgggtgttttctcagacagggccagccaggrttcaagatagattctgtgtttcctttaataaaaccatgtagacagaatgtgcagaaaactactagtgctttctgtaaagcagtaaacaccttacctagcagatcctaaataaactctgacaggaccagtatgcttaataattttgaattgtttagagatggcccagagctctctcctaagaaagtcacatgaaataaagttgaaccaattcactgaatgattataagacatcatggggcttagttctctacacccgcaaagaatattcgggtacattgtaatcataacttttcaaagcatttgagtatttattctgagcttcagcacagtatcaatctctgctgccaagcttctgcttcaggccccacctctcactgacacctcctcctcagcgtaggygggcagcaagggaaaagagtgaaccacgatccgttcatggtgttctctttttacaggatgggaaaaagattttgtgtggaaaaactttcagttaaaggctttaatcaggttcagacttccctgtgcttatgcctgcatttcttatgttgacatgagaaatcactgcttggagatatgcaagaaaattggaaagatgaacccagctttstataattgatgtaatcctgaaattctgtatgtgcgtcaagtgattgccaaacaggtcatttttaattacttgagcaattaggtgcttaaatttggcatgcctttttcttttactagagtactgaaatattcactgattttacttccttttgtgaaatgattacttacatttttctgtgtcagctttgtttatgacccacatgcagtaatgtttagtcttattcttaatagcccaacattccacagtaggtggtgttataatcagcgttttggggtgagaactaccaactctgttcactgactttattttataatggactagtttgtcatcatgtgatggtccagagctatttctttttcatggacacttcttttcaaaatggtaaccaattttctttagttgttacaaaactatcacttccccgaaatcagtattttggccattttaagtgttccttacacaaatcttcatccaatttgagtcaggaactcattgtattcatttcagtagggactaccctgtcttactgtatcataaatacatgttttgattgccaggcatttttgcttcaattttyggatcagtaaagtgggactttattagccctgtgtgacataactcaggacggttgactctttagtcatttatccagcctggaatctgaagacatgttggttttaaatgtgcattttcttttatcagttctaacttcacctatcaagacccagtccaaatgctaaacttctgttaattattctccttctcctctaagaagtaagtcatgcttccctcacataatgctggtagcaatatagaactcatccaaaccagacagattatgccaaagtgttggtgtcatgttttcccaacaacctgacagtttattgagagcactttatttatcaagtatctattattgctagataatagatatacttactcctttattacaaagaaatggaaactcaaatttgcatagttataagacgaaagartcagaaagtgaagctgcctctgctgttgtcccattgcctgctcagtgcttaccataaaccctgtacaggttgaggatggagagctcatcaaagtttacctgaggcaatgtgatgccttatacagttactgactgcagctaccatggctcactgtttctgccccttgctcattcaaagccactaatttcatctttaaggggggactttctcagagacatgggactttccttgtcctcttatattcatttgttcattcattctttcacttaatacatatttatgaggcaagtatgtaactggttttgttctacttgcatagtacaaaatagaccaaaaaaccatgtcattacagagcttatgttttcaccaaggagacagaacataaaaaacatataaacaaaatatgtagatgacttatatagtgtattacaaggtaataagtgctaagagaaaatgaaaactagagcaggataaggaaaaaaatatatatagtcaggggacagcattaaatagggagcttaggttccagctcctacagaaattgagactggaacaaagccctgaaagaagcatattccatgtagcagaacagctgtagcaaagaccctaaattgacagtctatgactatgtcggagtactctagaaatatcaaggctgtaagagtacagctaacaagagaagtgaaggacctcttcaagaactacaaaccattgctcaaggaaatcagagatcacacaaacaaatggaaaaacattccatgctcatggataggaagaatcagtatcatgaaaatggccatactgcccaaagtaatttatacattcaatgctattcccatcaaactaccattgacattcttcacaaaactagaagaagctattttaaaattcttatggaaccaaaaaagagcctgctaagcaaaaagaacaaagctgaaggcatccatagctagccacatgcagaaaattgaagctggatcccttccttataccttgtacaaaaattaactcaagatgaattaaagacaagtataaaagccaaaactataataaacctagaagaaaatctaagaaataccattcaggacataagcacaggcaagaattcttaacgaaaatgccaaaagtaattgcaacgaaagcaaacattgacaaacaggatttaattaaactaaagaacttctgcacagcaaaataaactatcatcagagttccagacaacctacagaatgggagaaaaattgtataatctattcatctgacaaaggtctgatgtccagagtctacaaggaacttaaacaaatttacaagaaaaaaacaaacaaccccattaaaaagtgcacaaagaacataaacacacttctcaaaagaagacacccatgctgccaacaaatgtatgaaaaaaggctcaacatcagtaatcattagagaaatgcaaatctgcaaatcaagaccaaaatgagatatcacctcacaccagagagatggctattattaaaaagtcaaaaaagtccttgcccatgcctatgtcctgaatggtaatgcctaggttttcttctagggtttttatggttttaggtctaacrtttaagtctttaatccatcttgaattaatttttgtataaggtgtaaggaagggatccagtttcagctttctacatatggctagccagttttcccagcaccatttattaaattgggaatcrtttccccattgcttgtttttctcaggtttgtcaaagatcagatagttgtagatatgcggtattatttctgagggctctgttctgttccattgatctatatctctgttttggtaccagtaccatgctgttttggttactgtagccttgtagtatagcttgaagtcaggtagcaagatgcctccagctttgttcttttggcttaggattgccttggcgatgcgggctcttttttggtcccacatgaactttaaagtagttttttccaattctgtgaagaaagtcaytggtagcttgatggggatggcattgaatctataaattaccttgggcrgtatggccattttcacaatattgattcttcctacccatgagcatggaatgttcttccatttgtttgtatcctcttttatttcattgagcagtggtttgtagttctccttgaagaggtccttsgtgtcccttgtaagttgcacttcatgtctaaaacaccaaaaacaatggcaacaaaagccaaaattgacaaatgggatcaaattaaactaaagagcttctgcacagcaaaagaaactaccatcagagtgaacaggcaacctacaaaatgggagaaaattttcrcaacctacttatctgacaaagggctaatatccagaatctacaatgaastcaaacaaatttacaagaaaaagacaaacaaccccatcaaaaagtgggcaaaggacatgaacagacacttctcaaaagaagacatttatgcagcccaaaaacacatgaaaaaatgctcaccatcactggccatcagagaaatgcaaacaaaaaccacaatgagataccatctcacaccagttagaatggcgatcattaaaaagtcaggaaacaacaggtgctggagaggatgtggagaaataggaacacttttacactgtcggtgggagtgtaaactagttcaaccattgtggaagtcagtgtggcgattcctcagggatctagaactagaaataccatttgacccagccatcccattactgggtatatacccaaagggctataaatcttgctgctataaagacacatgcacacgtatgtttattgcggcactattcacaatagcaaagacttggaaccaacccaaatgtccaacaatgatagactggattaagaaaatgtggcacatatacaccatggaatactatgcagccatgaaaaatgatgagttcttgtcctttgtagggacatggatgaaattggaaatcatcactctcagtaaactattgcaagaacaaaaaaccaaatgccgcatattctcactcataggtgggaattgaacaatgagaacacatggacacaggaaggggaacatcacactctggggactgttgtggggtgtggggaggggggagggatagctttaggagatatacctaatgctaaatgacgagttaatgggtgcagcacaccaacatggcacatgtatacatatgtaactaacctgcacattgtgcacatgtaccctaaaacttaaagtataataataataaaataaaataaaaaaatctattggtttaaaaaaaaagtcaaaaaaacaacagacactggtgaggttgtggagaaaaaggaatgcttttacactgttgatgggaatataaatttgttcaatcattgtggaagagagtgtggcaattcctcaaagacctagaggaaaaaaattcaacctagcaatcccatcactgggtatatatccaaaggaatatatatcattctattataaagataaatacacatgtatttkcattgcaacactattcccaatagcaaagacatggaatcaacctaaatgccaatcaatgatagactggatgtagaaaatgtggttcatatacaccatggaatactatgtagccataaaaaggaatgagatcatgtcctctacagggacatggatggagctggaagccatcattctcagcaaagtaacacaggaacagaaaaccaaacaccacatgttgtcacttgtaagtgggagctgaatgatgagaacacatggacacatggaggaaaacaacacacactagggcttgtcaaggggagggaagcagggaagaagagcatcaggaagaatagctaatggattctgggcttaatatcacattgatgggttgatctttgcagcaagctaccagggcacacatttaccaatgtgacaaacctggacatattgcatatgtaccccagaacttaaaagttaaaggcaaaaaaataaaaataaaaaaagaaacgtcaaggatgcaagtgtgttttgagtggaatgaaggagggaaaaattagctaatgaagggaagacatgtgagattaataacagggatgggggacaggggcattagtcatggcatgccttagccagtctaggtcttataaggtagagagcctgcccctgctttaacagagtctatgcaagaaaaacccaggtaatttgtgtttggtcttattgctcagtggtcctagcccacatttktcttcatagaatagctatccaaaaattgcttgcattatctgggtttagaacattgcttcagacatgtttcaactacactcactcatatgaactcacttttgggtcattattattacagtgtttctggtcaatggataaaaaatacagttagataaaagaaatagatctttctagtgttcagtagtgcaatagggtggctatagttaataatgtattgtgtatttygaaataactaagagtagaattaaaatgttcctaacactaagaaatgataaatgtttaaggtaatggatatcccaattatcctgatttgatcattacacattgtatacttgtatcaaattatcatgtgcaccctatttacatttattatgtatccataacaactaaaaattaaaaatggaaaaaaaattctttacatttactttggccgtgctcgatagcagcaggtaatacaacgcacagtatgtactcaggagatgcttattgaaagaatggatgtgtgaatgaataaatgaatgaggatagatgcaatcttatagcacagatagatatttccacctgtaaataaacataaattctcaatgtagacataaactacagatttattcatcatctgaattgaatatttagaatatgattaagtgttaaataaattttaattgtttttaaacacatgcatgttatgtcaaagtaaaggaaattggaaaaattactagttgtgtacattcagaaacatgctctggctctgagaggaacatttactaaaaataccttgcttcaccttgaatagagtcactagttaaaaagaagcacataaacccaatctcaagaaaaaatgttactcgatttttatctatctmtctatctatctatctatctatctatcatctatctatctacagtatccatagtgctttcattgtctttgtgcagtcttcaacttcaaatgtcaactacatacttgctctgtttgttgaacttacccgtttttatggtggtaatttatttctacagctcttcttgtagctaagacygtggcatttactgctggcatagtggatgtaaattggagtctctgaatttgttttagccttctcttttcagagtttggaataacctctgtacttttataaatatggtagattgaccttagcacgtggctaagaaacttttgtaaatacattttttaaaacttccctattttcatgtataataaagtaacagttttgggaaacatgagctgatatgtattttaaattttataggaaaagccagtttggggtattttactctttggtcatcatttgcttaataaacaaattgtaaatctgaggcaaacaaatatattcmttgttccatggggtggcaaagcatcagtaaaaataattactcacatcacmaggaaattagataacacttgctttaattgccctatcaatttaaatcaattttccatttatttttaacaactattatggttaatttaacgatcattgcatttcaaatataattccagagatgttgctttataatttactrtgccatcatttttcaattaactatttatgctatcttaagagtgcataaccttacccaatatttattcaataaaagtatagtgaagtagagttaatatttttaagtattttttattattgttgtataaaatgccaaatattttaatgatagctttattattttactaggtgtgtggtttttctaaaaaagtcttaagccaagtaagctatagaaattatgtctgtagtcaaaaggcccttgattaatatctgtcttcttgagtaatttgcatgttaattatcttatgattgtaaaatgcaatgaaaatgtatgctgcaagtattgtactgaatgagcattcaaacatattctgaaagagatttttaaaaattcttatacgtttaaagagtctattaattattcctttaaaatgatctcataataactttttaaaatacattcatgtgtcatttaacaatgggcatgcattctgagaaatacatcattagacaatgtcatcattgttatgggaacataatagagcgtacttagcaaactgaaatagaatagactactacaagcctaggctatgtagtatagcctgttgttccttggatacaaacctgtataccatgttactatactgcgtactgtaggcaattgcaaaacaacgataactatttgtgtaacttaacatatctaaacatagaaaaagtacagtaaaaaataaaagataaacaacggtacatctgtacagggcatttagcatgagtggaacctataggactgaaaattgctctgggtaaatcagtgaatgagtaatgagtaaatgtgaagtcctagtacattattgtacactactgtagacttaaagaacactgtacacttaggctagattaagtttatttttaaaaagtttcaataattaaccttagcttactgtaacttttttactttatgaactttttgactcttttgtaataacacttagcttaaaacaaacatattgtacagctatacaaagtattttcttttttctattcttattctataagcttttctttttttttttttttttttacacgttaaactttttgttaaaaatgaagacacaaacacacacattagcctaggcctacccagggtcaggatcatcagtatcattgtcttctaccttcacatcttgtccaactggaagatgttcaggagcaataacatgtaaaatgttacagcatggatctgtcatctcctgtaataataatgccttcttgtaggatacctcctgaaagagttgcttgaggcttttctacaattaacattttttttaataaggagaggggtacactcaaatataacaataaaaagcatagtgtagtaaatacataaaccaggaacatagttatttattatcattatcaagtattatttattgtttacaattgtatatgctatacttttatatatgtgactagaaatgcagtaggttcatttacactgcatcaccacaaacaccttagtaatcattatgctatgatgttacaatgactatgatgtcacttggcaatagccatttctcagctccattataatcttttgggcccatcatcgtatgtgtactctatcactgatcaaaacattgttatgcagtgcatgrctgtcctctattcttgttattgcttcatagtttaatataagttaagattgtataagccatagtacagtgaaaatcatctcttaaaagagacaatcgccatgtttaaaatgatttgatattctgccatgttataaaaataatatagcctaagtatacattttaaagtttttggcaggacgtggtggctcatgcctgtaatcccagcactttgggaggcmaagttaggtggatcacctgaggtcaggagttcaagaccagcctggccaacrttttyagtgtctactaaaaatttaaaaaagtagtcagacatggtggcgtgtgcctgttatcccagctactcaggaggctgaggcaggagaaccgcttgaagccgggaggcagaggttgcagcgagctgaaatcataccactgcactccagcctgggcgacagagygagactatctcaaaaattaaattaattaattaattaattaattttttaacattctttttattctttattttccaatagaatatttttaaggaatatttttaattttttagactgtatactggaataattcacttttttgtgtgactagtctcacaattagttaatcagttaataacaataaatgctaggaaatataaaatatgacaaggtggcaagagaacaaaacatgaaaggcaagcatctagcttcttttccttatcttctctctgaaattattacatgtatataaacagtgtaacttattcatggctcttgcctcagaatttgtgcaatttttgaacaattctatttctcatcttgaaatatcaagagtatccaggtctctgcccaagtgattggcagtacttctgttctctatgctagagtaacaacagcaatgaaaatgagcccatagagtcaacaatgagcaggactatacttgtctttttcctggctcacctaggattcctccacacccttcacctgatccctgctctggccagttacccttataaacaggatagctgaggaacagcagttaggcatacagtctggaaatagaacaaaactactcacatggggttgacttcaaaatctttgcctcatttgcattaacaattcttcaaatatttaaataacgagattgaaatacagtttttagtgttatttattgctgttacaataagttgaggattcatttttaaaaactgttaaaatgtggctaactgcattttctaaaaacaactacaacaacaaaacaaggctttccattttctgttcctttcttataggtttaggcttcagtattgcaggaggtgtggggaaccaacacattcctggagacaacagcatttatgtaactaaaattatagatggaggagctgcacaaaaagatggaaggttgcaagtaggagatagactactaatggtgagtgtgactccagcaaaactgtgtgtatatttataaagctcttgttttccagtgtatgactgtctttgtcagttcaggctgccatcasaaaataccacagggtgggtggcttaaaatggcagaaatctattttctcacaattctggagactacaaagtccaaggttccaaccgattaggtttctggtgagggctctcttcctgacttgcaggtggccaccttctcactgtgtcctcacatggcctttcctgggtgtttatgcagagagagatctgtctctctctttctcttcttayaaagccacctcttacaaggcccagtcctattggattacagcaccatctttaactcatttaaccttaattatctcctatagagcctatcctcaaatacagtcacagggaggttagggcttcaacatatgattttgtgaggggtccacaatttagaacttggacaaaaattgaaaagaagagacagcagatttatgagtaagagatttcaaaagtacatgtacartgtatctattttgttgacattttcaaaacaaatctaaattttcattaattttcttagatacacatggcatagagattatctgttgttcttccaacataatgtgtctcctattagggagagcaattactatttatagactgctggagaggtggggtttgcataacaatagaaacaacaccctggcttactgataagcgtattyccacagtcctttgtgcaaccagtatagacacagctcctgacttccaagaatttataatctgagttctgctacatgtgtaaatggatctcttcctttcctccccttagacagggttatagctatttcatttgccagcttctcacatgcttcagtagtcctaggcagtgattgacattgacacacagccagtctttctgaaccatggagttatatgataamctaaagcaaaattaaggcgattataagcaacaaagcatttgggactgtgttaataaaactgccttatgtccatttactgttgtatgccaaaatctacaggataataatcgaatattgtaaattaatagtaggtagctctcaagtaagattagygtatctgtctagtcacatgtctacccttgtaaaacaggacttctaatctgtctgcaaggagccattatctccaacaattttgtgagaagtgtctggggaggatcaacccccaatctcaacagaaaattaatttttatgacctgtgcaagttttggaggttgaacctccaaattttatatttatttgcctacttccctcagctttagagagctgtgtttaatcgcagtggtctaatttcatagttgccaatgacctttgtgttcagtaagctttgtgttagataagatctttgtaataatcttgatagctaacattgacctggcatttactaagttccatgttcttttataaagggcttttttgtaatgtaacatatttctaacagcagtacattttatataagcaaaaaagaattgagatgtagacaggttttctgacttgcccatagtcatatgtttaataatggacaaaactgggtttcaaattgaggcaatctggctagcaccactcattactaccaagctatactgcctcttgtgcaacatggtttcattagtttccttgaatttgtcagtcagttctttcctttcctcctttattcattattgtcattcattaattacttttttaataagtacatgckgcccacctactgtgtctcaggcagtagctgctattcaggaaggaactttgtcttgagaaaactggatgggcaaaaaatataccattaatgacttcagtcaaagttaaagttaacagttgtgggctgctttaccacctgaagccactaccactttcattctcaagcaattctgaatttttgtttgtttgtttgtttgcttgtttgtttttgatgtaaaagtttgttcttatgatgttgttctatcttctggacaacaaaggttgtcattaaggtataagacctgaacaacttctttctggaatataaactttattgcttgaaatgttgtcttgggaatagaataaattgtgataaccatattctacatagtgctaagttgaaaaatgaagaccgtttcgttctcaagtaatgactgtcttagatagttactggtttgacctttgactcacggttccatatgagtttggttgcaggcagctcttctggtatttcttcatccactgctattgtaccatcatggtaaatgctatgtgcttatttcttgaagttttgtttaaattttttgttttgtttccaaatttaaaaaaaaaaaaaacttgctccaaataattctgtcaaaggattttccaggcactacactattttttattaccattttgttgatattcatcgtagatataatgatcagtctagttaggacaaaatagagattgaataaattaacttttccaagtttacagagtaaaaatgagcagatctctgcctggttttgtgaaaaagccttagcactggtaaatagaatatttctattcctacaccattctttcagtatatcatcactgaaaacagaaagataggcacacagattcttccccgtagtaactcatagtgcactaggtgaaagagatgaagtatgtattaaaagtagaatgtgatggcatttattattcagataatcccaggattctagaagaaaacaaagaagagtgacagtcgagttagggtgtgaacttccagaggagcattgcttaagctgaacttgagagcattgtgcaaaagcacagtagtctgttaagaactagaaataacctagcttgtgccacttcgggagtattaagacataagcctagaaaggcggacaaaggttagatcttagactgtcttgtatttttctcattcctgttgattacctacctcaaaattgaatatgtttttcctcctgcctaaracaaaactacytaagggcaaaaatttaaattcttccttggtgtatgtgcaaacaaggttgaatatattcatgcctaccttattttggactaggaatacagtagtgtactttccgaaggcttgcctgaatagtatataaggtggaggcaactgactagttaggtcagtattttttagaaactcttaatagctcatactcttgatgccaaaagcagccctgattgttaaagcacacacctgcacaagaagcagtgatggttgcgtttacatttcttgggtgcacaaaaaaaattctcaaaaagcaaggacttatgctttttgcaaagcctttgagaagttactggatcataggaagcttataacaagaatggaagattcttaaataacccactttctttggtatccagtaacagtagatgttcaaaatatgtagctaattaatactagcattgtgaacgctgcacaaccttttggttattactaagcaagttactactagcttctgaaaagtagcttcataattaatgttatttatacactgccttccatgacttttactttgccttaagctaatctccaaaatctgaaatgctactccaatatcagaaaaaaagggggaggtggaaatatatttcctgtgaytttaagagtacagagaatcattcacatctctggttagttcatatatgtctagtgtgtaatagaagtcaagatgaactctcaaaaaaaaatgatttcgaaaatagctgtgacataatccttaattgttttgagttttaaagcatagttttttttaaagaaacttcaacagtaataggtctctcctctcttatgtaaggaagacagaattagtacttccaagttgaaactggaaatgaaagaaaatgattcattttatactttgcaagcaaaataaccctgaaaaggagaataaagacaaaatcactgaagccaccctaaaagaccaattatcttgcttcaacccaaaaatatttattaatgctctccttctgtcattcctttctacctcctcttctctttactaccctacattcatattctttgtatcttccccctcttctactctcctcccacaaaggaaggacaaatgatttagattctatgatgtaccagctgtaccacactctgcatatttttctctaaatatgctattctttctaaagcaatttgcaccacttccttctgacacttcttaggaaaaattccaccatatattattcactcagagttctgtaagtaaactggtctaaaataaaactccattaatttctttaggctttcatggctgaatactcacaattcaggaagtctcctagcaactgccctctactgagagcacagtcattttttaaagagttagtaataacaataactcttttagtttctcaagtaaaatagctataatgttgggcaccacctgaatcataccatccatattgggtactttttctccctgaaattcttcttatatctcagaatttaacgtatgtatcttaaaggtcatcttttatcaactcttgcttggtgcatcagaaaagcaagcatgtgaagcagtctctgacctctcatagaacctcctttaaggatggataatacctcccgaaaactatttattaggtaataagtatcattaaaatgttttccttaaaattctgttaaaatatattttcctgtaaatgtccccctttattcatagctctgtcacttgaaaacaaaaaggtgaagactaattcctcttccacatatgtttgaaagagctrtgtctttccacttctccacttctcagttttttaggatgttttagaccttttctctctcttccagtaaattttatcacatattcatttatcttctgtaaatagattatacttattacaaaacttctttatattccttacagttttatttcctactttaaaaattccatgtaatagtatagtatgtgacctttgtaaatattctacttaaagaaacaattactctgtctgttacctttgcaataaacctcttggtattttaaataagatgaccataatatcagaccactctgatgtttaatgggtcacccaaatacatggtatatgttctttttagcaaaataatatttttaaaaatttcctttgtcacttagaatttattgttcactagaattttgttttgttttttaaatggtaaagtgacagtgacattggattttgtggattgtaccagtggtttagtgttgtagtctcagatgaaatagattctcttggccttgaatttcagtggtagtcagagtttaacagcataacagatttttaaattctttcatatattttcacatattggctttattaagcacttccaaggtgatacatatagcccaatatattagaaaagtgttaacttcttcccctttttctatataaaccagaaatgttgaatccaggataatttgattgtcttctctgcagggacagcattagttattagttgacaaagccccttggcacattgtaatttaaggtttaaaatcttagcctcttctttccataacccctgctcgacatttgaagaaaaaattgtcagtgagagaacttttataccttttacagagaattagttcttgtgttttctttccttaaagggaagtagtaartgacaggaaaagtaacagagacattgaagtcgagcggaaagacactggactcagatgagaaagstggatttcrgtcacaggcacctagcactgattctacctaatctgtcttgggcaagtcayatccatctttggtcttctattttggcctctgtaccatagtagcattatattagattggtatttccaaaagtatgckttaaaatattgttctcttttctgtgtcacgtgaatagactctgaccaaatacgtttgctaaattctgcaacttgtatcccaattctcttgaagattctcaatgaattttagcatattaaaaattctgtgaagtcctgccatcaagtaagtgatttgattttgattaacaaatctgttttatcatggagccttcttcttagagyaatacttacaaaacacctaaaactagtgtttagtggaatatactcaggatgtgctatgtgtgagcatatcttatttttatttgaaaataaatatcctagagtaaagccatgaaatactttaggaaatgtgagtagaaacaatgcaagtttctgaatgagtattagttgtgatgactgaaattgttattatttttggtaaatctacaaaattgcctgatttcatccaagtatcaataagaaaatcaaattgaagacattgcgaatatgtagaaattatctgaataatgaatgggatgttaaagcatattcattggttataccaaccttagatatcttagaatcaagacctgtaactctctgagcatgtctctttcctaccaacaacacattgctttcatcttgaaaagatcttttgcctacaacacctcatttattcttaacccccatctttgagaggtagttaggacagtcattactgttattcttatttttcagaaggaaagttagaactcagttagaacttagacaaagggatttccaatattacataactagtaaattgtgaaattggattcagacatagattttgatgtcctgaagttaaattcctttcactggttttgtcaacatctctgattcttgattttggttacacatttgaatctcaagataagctcttgaacactatgaatacccagtcctcagtcaaccctgaataatcaaatctggatttctggggtagggatcatgcttcattttattttwtttttttaggttttccaaatgattttaatgtgcagccgggttaagaaccaccatcctaccttgatctaaccacatcctagcccattctgctgctaccactgcatctcctaaggacaactttggtggtagtgctcattctatcaagccagtagagtataatttagcaattacctgcaattggctaaaaaaaatttagaacagttcactctcaaaattctgtcccctgagtttaaagtcacttctgaaacaacaggataaaacctggacaactgtttcttgaactctcttctaatttatctcaaatgtaataagttataatacaatgtaattgctatgacatattttatttaagggttagaacctcctattgcactcttttttattttgcttatactcagtgtaatagccctctttatagaatctgctctgtaagtatcatgttgctgtcattttaaaattatcttaatagcacactccaaaggttgccactaatatatttctctactctaaattacatatatattactatgctaatatattgtttacattttaaaacatatgaaaatggaaatagaaatataaatatccatgtgattaatattaatagaaatgcaaatgtttttctcttgtacccagtggattgccctagggttcatatcatactgtccattttggtgacctctgctagagaagaaatttgagtaaatcaaaacaatcactcttgcttgctctctttctttatatggagtraaaggttaagaaatgaattaatgattaatgaaggaagaatagaatcacaatgatggagctttgactgtgtaycttataaactaatatgatctggtgctaagattctgtaccagcttttcatccttatatcctgtgcctggcacagagtgrgtatccaataaatgtgtattgttgcttgaatgaccttcwttcttattgctttactctctgactsaacacaaatgtaaratagaatgcaacacaaatgcttcattctttctataaaatagggaattttgattgcttttcctttggtgttctgcgatcatttttttaaaacttagcttaatacctcaacacttattaagtgccaactatttatatygcatcagctaggggaatagagatgaatatgatctaatcagttgcccttgagaagatcattcttggaggtgggaagaggcactgtaggaataagtgtttcacaatatagggattgataatttctacataaagakccctgaacagcagcaggatcaacaaagcatgatgtctgattatggctgtttgatttctattygtatgctactttatatcatacagagtcttttcaacttcatggtattattcttttctcataaacacaaatctacaaataagtataattcccattttacatgtaagaaaatgaattcttagtaaatatgttaactgacttaaattcgtgaaactaggaattaaaaccagatctgatctgattctatgttcaaaattattctccctgtatcaagttgccttcgtttctagaaacagcaaggtttaacatatgaatattatttctagtaaatttaagtctattcattggccttgagaaattaactttcttttttcccattccgattttcattactcatgagatgctgctgtgtgtgtctcataatgacaccactgtacttagcttctgttctttcttaaagtttttgttcttgctcatttagagttaattttgctctatgacatacatattcatttctgaaaagatgaaaaacaagaaaatatttattatccaaagataaccattactaacatgccttttatttattaatagttattattttgaatacattttattataatagttaatttcagagtactatggagattttaatccttggtttatgcatatttattttcatagcattggcattactacattggattggtctgctttttaatttatcttacaacctaatgatcagccactttgtttcctgtttaaaagttaactttagagttttcttaccaatgattctagagttccacatttccttgtactatgccttaggtaaccttaatgtctgtaatcacctcccagttcatcccaccatactgatattcctgcaagaacatggaaaggtcagtatcttgccatctctatattgctcattcctctttattahattctcatgcccccacacctcccacctttgtattattacatttatgtttgcttacacacatttgaattcccacaaaacttgccatgtctccttgcaagtctcctggcacctctttcttcagctggtttgccttcctttgtctgcatcatgttcaaattcagtgctccctcttctgtttgagagaatgagtcatctcacctccagcctcyctttcttggcctcagtcctctttcctattagcaaacacacagccaggctgcacatatgtccccgtctgtgtggtgcaccccacagagagcacttcaatcaaattcacatgatttttttccttgaaaccaggccagttgctcagtgttcaccattataggcagatatttgatgcaaatgagaaaaaaaagaataaaaaagacaatgacaaacaatgacaagagcaactagccaatcagtgtaatgtcccttctcattgcatacaatcagctccagctgtaggccctttatcttgagagttcataggataatgcacacacataattaacccaaacaaactcacttttgtggaaaacattttgaagacttcagcacaaaagagcactttttggtccaaatccggtactattctgaatttttaaaaagaccacacagaagcttcatcagcagcaccctaattaaactcatcagttcacagatgtttataagaaaatgatcagcgaaaattttcaccaagaaatcctgcttacagatgatgacaatagtattagtgataagagctaacattaagaactgtattgtgcctgtcactttatataggccaacacattttaatcaatagccttttgaagcagtaactgctatcattcctgttttgcagatgtcaaaactaaagcttacaaggttaaacaagtctccccaaatcacacagctaggaagcaccagggtctaagcttcagtatgcgtgactcaaaagcatgtgcttttaatcactacattctgttgccagtatcataataccacctgttytgtgactgaaatctawgtaaatttttcaatatttcagtcaccaaatagaaactgagtgaactaccactattttaaaccactattattattstcyccagtatcctctttccccatttctcaccactacctttccctcaacttctgctttatggtctaaaaattttcctcrtggtctgaagactctgttagcaaagtcactctatgaaaatgttgttgaaggtaatattttctggatcatttcactgcccaccttaaaaatggcaaaaggtgcaatttaataagcactgaccacatttctctttcactgataatctaatgagctgtgtagtttccatactctgagragagagacaatgagcccttgtcagaaacagagctttgctgtcacttataatctaatccagttagtttctagcctttggtttttatttttaattattattgacttctcattccccctgtgttatgccaccagatactgtttctcttctgttctctcagtatagatgtttttgtgggccatagtcacagtattaaaagctgccttaggcaatctttttttttttttagaggaaacacccactttcatatacattttaaaccatagaacatcacatgtaaatattcattatcggccaggtgyggtggctcacgcctgtaatcccagcactttgagaggctgaggtgggtgaatcacctgaggtcaggagtttgagaccagcctggccaacatggtgaaaccctgtgtctrctaaaaatacaaaattagctggcagtggtggcayatgcctgtaatcccagctactcgggaggctgaggcaggagaattgcttgaacccgggaggcagaggttgcagtgagccaagatcacgccatggcactccagcctgggcaacaagagcaaaactccatctcaaaaaaataaaaagaataaaaaataaatcattatctargcacaagtggtaatggccctaaaataaatgattaatcaaatgtataagaaggttttgaagagacagtgagatcagtgagatatgttaagctgctttccattttacttatttattttttgactggtcagtgtattaggatgatgcagtatactattaccactggattaagcaggaaatataatgattcctcaagcttttataatastttggaatttattctacttttatatgtaaactcggaaagaaaccctgttctcctaaagggagaaagaacaggtgatatgagccctagcttttaatgaatcaacatacaaayataatctcattttcatctcgtaaggaggcttgtgatccaattgatggctttgacaattggaggcagtgtgacctctttrttgcaagttaatctctttaaaaaacagtttttctcatctgtaaaatttgcctgattaatagtatctacttcctggagctcttctcatgataagttatatgattcatgtcaaaatatgtgacataggactcytaaaatatatggcatgcaartattaaataaatgttagttattattattatcrtgttatttctgtattattaagggctgccattatcaactrtgttctccatacctgaagttcctctacattctccctctctgcatgagtctattcttctatccattcattccacaaacaattgtgtattattaatgtgggtttcatgaaagcaaggaccttgtctatctggaagaagtagtatagctgagtggttaacagcatggtttctggagccaaactgtctagctttgaattctgcctctgacacttaccagatcaatgacttggggcaagtttcttaacctcttggagacacacttttctcatctgtaaaataaggtaattataatagctacctcataagttatcgtgaaagtttgattgtgttaatatatgtaaaatactttaaaatagtgcctggcatgtaatatgggctatatgtgtttactatgattattgattatcatttttattatttatcatatctctaatatctggcccagagtctgacacataacaggtatgcagtaaacatttgatcagtgaataaacaaatgccagacactgaaatgaaaaamgatttaagggaacatgtcttatctagaagagaaatgtgagaggtgctagagaagcttacggcttaatggagaactcacagccagcattcaaacacatcagtcaggttcaattctctccagttccacagtccctaacctgggctacatcaccaaggattaactagcacatggaacttacatagcaacatggagcaaaataataaagattacgaatagtagtgctgcaaagtatggtatagctgaagtgctaattagatagtatagataatrtgtactayaggaattcagtccaatgcttttgggacatttattttaattttacattataccagtggaaagtaattaaacaattatgtcattaaagaaatagtagccaaataaattcaaacatatatggtcaactaagttttgacaaagaaaataagagaacatgatgaagaaaggctagtcttttcaatgaatgatactgggaaaatggaatctccacatgcaaaagaatgaaattggactctaatgccatatgcaaaaatcagctcaattkggctaaaagacctaaacgtaaaacctaaaaccrtaaaatttctagaaaagaacataggggaaaagcttccttgaccttgtcattgacaatgttgttttggatatcacgttaaaagctcaggctacaaaaggaaaaataaataggactacattaaattcaaaatcttctgcaaagcaaaggaaacaatcaacaaaatgaaacaaattgggaaaaaattgcaaaccatatatctgatgataggttaataaccaaaatttataaagaactgatacaactcaakagtagaaaaacattaacasgattttaaaaatgcacagaggacatgaataaatatttctccaaagaagatgcaaaaatgtccaacaggtatgcaaaaaggtgcttaatatcactaatcatcaaggaaatggaaatctaaactgccatgagatatcacttcacaactgttaggatggctattatcaaaaagatgagaataacaaatgtcagtgaggatgtggagaaaagggagcacttgtacactattgattgggatgcagactggtgtagccattatggaaaacagtatgcaggctcctaaataaattaaaaatagatttaccatgttacccagcaatctctggtcttgttatatacccaragaagatgaaatcaccaccttgtaaagatatctgcactcccatgttcaatgcagcattatttacaatagccaagatatggcaacgaccttcatgcctgtcagtggataaaaggataaagaaaatgtggtatatatgcacaatgaaatattcagccttaaaaaatgggagatcctgccatttaccacaacatgggtagacttggagggcattatgctaaatgaagtaagccagaacagaaggaacaatattgcatgatctcayttatatgtggaatcttaaaaaataaaagtcaaatatacagagatagaggataaaacagtggttacagggggaggtggraaatggggagatacagatgaaaggataaaaagtagcagatatgtaggatgaacaagtctagaggtctaatgtgtaacataaagactatagttaataaaattgtattatattaggaattttgcraaataagtagattttagctgctcttgtcacaaamaattataactatgatgatggatatgttaatttacttcactatagtgaccactttattatctatatgtgtgayataacatcatgctgtgaacctgaaatatacacaacaaaatttatttttttatatagtagccagatacggataacctaggtatttgaaatacttcctgaattaacgtttattctaatttcctcaaagtttaagtctttttagagagattatcttaaaatcatttcagagaagtggtgcagagacccactgtaatgccactgccatgaagtcagtgtatcatttgtatcacaggcttttccatgcaataaagaaagaggcatttctgttaacacaatgacaatagggtacccttgaacttgctcacctgaaaagacgtgttctgaatagactcatattaaatgacattttgatgagaaccattttaaagtgaaaaaatcaaggtttggcgaagctataaggaaatgagggctctcatataatgctggtatgagagtaaaccggttcatctttccagagggaaacaggcattttcacactaggtatcaaaagccctgataatgttcatatagtttggtccagcagtttcacttgtatgggtaaatgtgtatcaaagaaatattatcagagttgtgcacaaatatagaaaaaggattagtgcaacattatttatagttttaaaaaattagaagcaaactaaacatgcgctagtaagaaactggttagrtcattatactgtagtcatgcaacataatgctctgcagaaaacaaaagtcatcttgttaaactacattgctgctacaaacaactagtcactctaggtttaaaaagcaggttccaaaacaatgtgtataataaagtcaaaattgtttaaggcaatatatctaagtagggagatgatgaatgatttttattttcttcttttttaagttttcttccactaatatgtgttacttttctatcatagaaactatagcataacaaaaaaggcatttgactccttattttccttnccacaaatactattctgaattccattactgtatatcacttcctcatttaaaaaaaggcagaagcaaccttattttatagaatcattgattgtacttatctgctttgactaatgcatttaattcatctgttatgtcaaggatactggacagtaattatcacaatttataattccasgtatcttcttgcctgaatatttttcttctgctccatagatttaactctaatattgatctttttcaccctttcaggtaaacaactacagtttagaagaagtaacacacgaagaggcagtagcaatattaaagaacacatcagaggtagtttatttaaaagttggcaaacccactaccatttatatgactgatccttatggtccacctgatattactcactgtaagtaccattgtcatcttcaaatagcatgccagacttgcagaactggaattctataaaactgttgacaaagtgttctacttgtaccttccctcttggttaacttctggaaatacttcagagggagtatcctaaactccactcctatgttgccttgcaggcccttacctcctgtttgaagatgagatctcctaatgagttggcatgcccaccattatggaaaggcttaatgttgaggacagtgtgattaaagtagtgtatgggcaatacattttgaaaggctatttctcaagctcctaaagcatgatcactctcatgccatcatattatttcttccaacttcagatctctgtagtagtagattagaaaagagactggcaaatagaccagaggtagctctatgattcttcctgaaaaaggggatcttgcaattgaatggcgaaattatgatcctcaatcaccatcacatagcttttactttacttgaatttgttatattggcaagtaagctggagaaaattatcagtcactatggcaatagaggtgagctggaagtgggacttctgcagcaacaactaacaactaatgagactatgctggggtcctcaaatttccactgttgcataagcctcatatgttctcctcttcttaataggtcaacacgaatcttaactaagtttctgtctttgaagactagatttagaagcaatttactttgttatgtaaatgtaagggatagttgtgtcaacagtagtaagcttgctcattctgaaatgttgagagtccatttgtgagactggaaacttggaacgtcttcakaactggccattaattagtactatggtctcaagcaaattgttcaagttctctcagacttacrtgtttctcttgagagaaatgtgttgaacaattttatttcctgcccattgcattagctattgcttttcttaatgatgattctgaaacaacttacctccaaaatatgtatgttttcaagctggcagtaaattgagatcagacttaccttagaatatgaaagagttttaactttcagagtttttcaaactggaagaatgtagcaaaatcagccctgatagtctgtgagccacttcatgcagggcatataaggtcaatgtcaaagacagaaaagggagaaaacgamtctaataaacctaacaaataagtattgagtaatttcagtatgtacaaggcacattgtaaggtaatatgtgggatgcagaggagatagaatcatggccttcaaagagctttgttgggaggaaggctaactcagatatataaataaaagcaatatttggcagaataagaggtatgcatatgccatgggagaggtgaatataaatgttatttgggaactcaaagaaaagagatacatcatctgtctttggaacatcagaaaaatatgcataggatggcatttcagttgcatcttcagaatgagatttcaacatctgagatgggttaggtaggagaggcaaattctaggtagatggtacagtggaacaaaggtacagatgtcaggaagcmcagcctatgtttgcggatgataggatatgtgttggggggtattaaaattgattgatcttgcaagaatggcaaagaggagagtttatactatattaaatacataacaacaatggagaacatttaagtaagagaatagtgtggtcaagctgaatttcaggaggttttacctcatctcaacatataaaatggatttgaggagagagaaaggagcaagagacccagttaggaggtgtttttagtcacctaaaagggagatacattaggaaggaggaatgaaaaagaaaggccagagttcttggcctttgtgggatgggaatagagtatattttgggagaaagtctcacaggagaacctgatccttaggaggcttttactctcagtaattggatattaattatgtgaaaacaatgtgagctctgaaattagaaagctaacattttatttcaatagaaaattaatcattgttctgaaaatatgtgtgctggatctcttctccagttcttctcttcaccaaattagactaactggcattacagacttaactattattaagtctttcctatcctaaaggtcaccatgtgcttgtatatattaaatgcaaataagctgcaactcccccctctgggaggacaagaaaaaccttggcatgcagcaaagcctttctgtttttaatacatttttctgaagtatagcatgacacattgaatcacccacataacaggtttcttttctctttttcccccacctcttagcttattctccaccaatggaaaaccatctactctctggcaacaatggcactttagaatataaaacctccctgccacccatctctccaggaaggtactcaccaattccaaagcacatgcttgttgacgacgactacaccaggtcagatatgcctgttagttaattggatttgctcttattaccagaaagaaatcacatttgcctaacatgtcaggtgttgttttggatgctaactaaagcttctgggtcccattcaaccttattgtagttttgcctcaggtgcattgcaactgtgtcattgtcctctgataggcagcaaaatcacaaaatatttgtgaataaatagtaagatacacttatacatcactttgccatttattaagactttctatatctgatcacatttaagctttacagccatagtgtaaggtaagtattaatacttgagaagagaagatagtgctgagattcaaaaggaaggaagtagcatgccaatattatatatttggttagtggaattcaatgggtaaatgaataataaagaaatgtaaatgtaaaaactttttgtctttaactggtcattacatttggcaaaggaatacaaagaagatcaaggaacaaaaatttcccccaaactccctccagagtgacctgtcccagggtacccaaggtgacgacctggcataaacctttcataccttctccatgttcttacaaacatatacaaatgtattttcagatatacgtggggcctgacattatttttacaaaatragtttatgttttacacattgttccacaatttttctccatgaacaatacttttatcaaaaatgagattacatgtatacatatgtgtgcttaatttcgatatgtgtttgtgtgtaaagaatgatagatgggttgttttggttttataccctgcctgtctaactgaagtcatttgtcagcctttcaaaaagtagagactttctgccggagaggaaagctttcctcactggtatatgtgsatgctttgatctttctgttctttggtgtatctttttaaatgattaagcattttccatttattttgcaatatcaggtttgctgaagtagctctttatatctttagccaaggaatggaatgtttagacgctgaaaatgtgcatccatgtaaatcaaatacaagcttcttcctatgctgaaatgtctgatctctatgctcttaattaaaatgagggctgcggcaaagataatcctcacggctctctaaggaattctgtaaatacaggcacctttatccaccagagtgatgatctctttgctctcatcctattactaatatttgatatgattttaatttagaaatgtcactttatgttactaggccccatagcgaattaacatttattcaagccccttcataatccagaccctctgctagctgtttttatacactatccatttaatcctccgaaaaacacacagaaaaaggctttcatctccattttagagatgtagacattgaagttcaaagaggttatggaacttgcttatggtcacatagcttttattaataagtagaaaaactgagtgccttaacagctttaaaatcctagctaagagaaaacgttttaattttctaatattaaaaatgaaaaccaagtcatataaaactatgttcatcatagaaatatgtggctagaaagggacctcagagttttgatgagctctaaaaacaactagaccatagttgaaacctacctctaccactgactgtgtgaccctgggcaagtcatttaacctctgcaagcttcagttttctcacctgtacaagggaatagaaagtgagtctatctcaataggttgttgtratgattaagtgagctaatgaatgcaaagaacttagaaaggtgcctggcacattataagtactcaacgaatgttatctatttacagtaactatacttactgtaatcttaatccacttcagatgtcacatgaaatatttttacggtacacrtgagatatgcctcaatatcttagatcctgcccctgcctcctttcctgttcccctagaggacagtctcactagtatttccctacaaaatcagaatggttggtgcctggcaaactgttaaagtaaattatgttagttcacacacataaacatacacatacacacccctccaccactctcttaccattgttggtgttctctcataggtgcttcacactgtaggcrttaccatgggtctcagaggtatttgctcagaggcagattcactttctcattcataaatattaattgaatacttcctataagacacctggtgctgcactagagatgcacaaatgaataagaaatagcatytaagaactatycaattgaggcaaaaaaaaaaaatgtgtaaatcaatggattccccaatgcctgttccctaatttatgcagaaccccctccatgaagttttccacaaagcctaatttattaatttttttcaaaatcttgagattatatattttgtaatcaaaatgccctttcttttgtaaaagaatttggcaattatttattatgtttttacttagaagagaaaaattggcaactttttgttagtcttcattttttaaatgttaactatctgtaaaattcaaaagtctgagaattactaacagaagcaagcaagcaaaagtagggtcagttctctaaagtgcccttatgtagcactagcagagttccctaacaccacaagagacacttaggaaatactgctaaatgagtatgagtattacatgaatgccataggaataacctatggcatcaaagaaagttttaaagaggatatgactctaattagtacttgaaaactgtgtaggcattggtcagagagtcaagagatgaggaagggcatttgtggtagtgggatagattgtgcagactcacagaagaatgtgaaatagaataaaatgaaagcaagaattagaacttgaaatataagactcacaaaggaaaatggtacctacctttggatcatctttatattcctgttccttctctcctatgcaccctagctgtaagattaacaatacatagagtaataaaaacaaaaggatcattactattcaccgttaacaataagtgctgtaatatatattattgctcctatattatttatatgatattcttattcttgatttttacagattaaaaaattctcagagaggttaagtaattgcctcatagcatacagcaatcaaatagaatcaaaatttgaattcaggtctgtctgttttcaaaggccccatccctgcatccctggttggtagtgctcgtcctaccacttactacctagataactctgaacaagtcagttcatctctgtgagtcttgattttctcatccgtagattcgctataaaggatcttctaatttcttcatggaattgtgaagttttaatatgttaacatgcacgaatgttgtcatttttagaaggctctgtaaattattattctaagttcatttaggtgcttatgtttgagacctactttgtattttcctaaaatagtaaatcaagaaaataaatctctaataacggaacttgggccagtagggaaacatgtctgtgaaatgggaactttcccataacctataaaatcacatcaaattggaaaacttttgttccatgtattcatatcttaatctattgtaataaatgtttctctactttcctgatttatagtcacgtttgttatggatgtacggtaagaattttaaagcaattttgattcaaataattctacaataacctaggtagattttttaatctatttctattaaagaaatgtacacctgcataaactgggaagttttatttttccatgaatttagaagaaaagtcacaaataaaaaaagttttggatacaatctcttagtagcatgctcactgagtccctataaatcggcattcattgtgatgtagatatctgattttcaatttttggaaaataaagctattacaacaatactgagattgtttttgtctcaggcattatagactgtcagaatagaaagggccataagtaaatatagagtctaatctctctttctggttgggccagagacacagggcccagagtgatttgttggctttccctggtccagtatttgtaagtagtataatcagatttagagcccatgtatatgtgcactatttttttggctggagtaagaaagtagcaattatgaaaaactatcttcaatcaaggattacctggtaacagtgtctattttgtatgttaccggtaactatgagttctatctttactgggccaagttttccctagttactcagaagagaggcaaaccacacatcatcactatctggctgaaaatacttaggatatgcaaacagtactaaaatgaaacaaaaaaattggtaatgcaaagtaaaactactctttcaagatgtagggacctaatttcccaagttatgaatgtgataaatagcattatgaaacccagggacctaaattataactgtaaaagatatatttctcagtgttagaaaccaagtttacctagctgtgaatttagtgtgtctttctggctgcctctacttattggtccctcacatcatttagttcattaaaaagcatcatataaaaaaagcctcaataaagatttcttgtccacagacactttacaagaactgccccaaactgtaactctaatattcaccagtttgactctgtcacttactgaacagacataatctcatcagtctggagtccacatctactctattgtctccgaattatagaacactagcttactagccatgtcatctaatatatattcaagttgccttttctccttcrttcagttatttgctcattcagtgaatattcagcttctacccatgtcaagcatagttattagcaacatagtcacaatggtgaacaaactggtcaaggtgcttgccctcatggaatttacattttagtatattgaataagagatgtataaataaatgcattaagttcagttagtgctaagtgctacaaaggaagtaaaataggataatgtgatgagcagtgattggggaagagaacaatatgaagtaggataaccaggcagtgcctctctcaggagatagcatatggactgagacctgaataaaaagtagaaagtggtgatgattaaagatcagagaaatagcattccaagaagagggaatagcaaagccaaagtcattgaggcaggaataagtttactgtgttcctgcaacataaagtccagtttggccagaaagagatgagataatgggagcaggcagaaaattaggttagataaggaagcaggaagcagaagtaggacttcacaggtaatgagaaagtgtaggtctaattttaagttcattgagaattcattgaagagtactaatcaggaaaactgatctgatttatgttttttaaaaaaaaaaaaaaaaagttctggctgctgtgtggagtagagagaccactggaaaaaaagagggaaaagattatgacacctgggactgaagtgagggtagcaatggaagagaagaggaatagagaaatccgagctatatctcagagcaaggtttaatagcccatgttccacgtgaagagcagacctggcttagtcagactgttttgactactgaccatttttatagtttttattacctatggagtagtctttcaggaacagcataagtatttgccactgttatttgtttctttttgttctgtttttcttatctcttattgtttaactttgtggattagaactggttagaagccagmccactgtttgtcaaatgtttctactcacatgcccttaacttagaaaataaacttgttctcctcaggctctgaggtagaacatgaagatttctgcccaagcataaaaacacataaaatcttgtatattttatcacaaaagcttgcagaatattgtttgctttaaagtaaaaatattcttattacaaactacgttatttttcttccgagtcttaaaatgaartcgacacaccagaaaggttttctgaagatattagtaatccctggcaaataccacaaaccccaaggtacacttaagtacccaagtttgagaaacactgagctaagttacacaaacttgccaattattaattgtgttttatataaactgtcccttaataatggctcaaggtttatggtacccattaggaacaagctctcgaaggatcagacaacacctcatcagagtacagtacaagcatgttctagcctctcttctttttagtttacatttaatgacttaaaaccattctgagtgaactagaagtttcttcttatacaggaaagaaatcttttcttatatgcttttgatgcaggatttctcttggccccttcactggactcgcggtaggggcaccctgtctacttggcccaccgtgctcaaccccttgtgggagggggcatgtgagtgagtgagtgtgggatccagctggttgcttcaggcactggcacaggagcaagctccgtgtggggcccatggccagacaaggcatgtctcctggaggggagcgtggtggcatccaggtgagggtgcccataatcccatagccccagagagggtgtcacagtactcttttagttctgccatttgtagacagcagtatgttagcagctcagttggccccttgcctcatggtgtggggcggctgccctcctctggtggtggcaaggtctggtgtgacagcctttctgagtacctgcactcagtggtcccaagctctcgtccagcatccatgaagaatgaggtcacacagatgattaaatgatagtgaaggcggataatttgactgagcgatgaaaacgtctctcagcagggaggggagctagagaggggacaggaagaacaggtcttcttccctgaagtcaggctgtagtcagggttcgctggaggaatagaaataataggatggatgcataagaggagatggatgtataaggggagtttattaaggaggactgactcacatgatcacaaggtgaggtcccacaataggccatctgcaagctgagaggcaaggaagccagtccaagtcccaaaatctcaaaagtagggaagccagcagtgcagccttcagtctgtggtcaaaggtccaagagtcccaaagctgaagaacttggagtctattgtttsagggcagaaagcacccagcacaggagaaagatgtaggctggaagactaagccagtctagtctttccatgttcctctgcctgcttttatcctagctgcactggcagctgattagatggtgtccactccaattgagggagggtctgcatctcccagttcactaattattgactgagcctggagtctttatatacataggatgagggcaggacaggccataggtagttttggaaaaggcaacatttgattggtaaaaaggcattatccagaaagaaccaatcaggggagagtgggtgaacaggagtagaagttatcactttgggccatgggtttcaggctgttatttttgcttgaaggtggggtttcactggttacccacccctatctgcctaggcgtttggctgcctcctgtcactgtcacttttagtcaagtatggtggaaaacagctagagtaccctaagcaggcaactgacccggctttagaattacagtagaataacagagtgattaggtgtgtgggtcctggagctaccctgcttaggtttgaatcacaccatttcctagctgtgtgaccttgaatcagttatgtaactcccctttgcctctgtgttgccgtttataaaaggggcaaaataatactttctacatcataggtttgttgtgacaataaactgagttagtacatgtaacgtgcttggcaaaaataagtacctgataattgttagctgttattaatactattgaaaaaacaaggattttaagatgaaccgtgatacaaataaaaccactttttggcaaatatcctcaaattatttatggaactgtagccaacaatattacgcagctgctcaaacatgttgtaatctacgtatatggatttttcaacttatttatcttgtagaacacattagaatattttattacagagagtcatatagtctgactgctttattgagaatcttaatttttatgactacaatgaatatctaataccagctgcaatgaaaatctaatacagaaatcagtggaagcaaatatggtataaactagtctatcagttttccctctggctaaaatatgattttttgatggaaaatttgttgattttgcccttttaaaaaattcatagtgactctcaatagctaactctaggtagcttttcccttaaaaagttctgcaaaacatgacatcagactccttacagactttacaaagttcattataaaacttaaccaaattaaaggttcatgaacaaatgtctctgagattttgttttgctctgtgttgcatttctgatttctccaacatagagactggtactataatgtatgttttgaagcaaagtgtagaaatgaaaggggggagtgagacaaaactagtgagamagatagatcattatgtggaagcctcaaggagagttttctctttattaatgtaaataaacaataaagagaaaactgaccacacaaaactttaaaccacataggtttacttatataaaccatgaagaatsattcatagaactatcctactagaagtaggaagcagagagagtgggtatgctaatggcgaatctaacaaatcttaattcaaggggaacatccaaatatatattagaaaacacgttaagctgctgtttgctttcaaggaaataaatattagcaaaaatgcaacactaatgagaaatttaaaaccgkctcctatagatatttatcatttcctatgtgctcatgagttagccagacataaacacacaacactatgctctataattttatggaaatggtaattgcatatacatagctattgttgctatacatgtaaaatttgaatagtaatttaatcaatgttgcattacatttttaatggagtaagttcatccttgctttcattctttagttcattgatgcaaaaaaggattgatgataggcaatggagaattttggagggaccgctgtagaagccaaccatcagttggtccctatcctcttacaagttaaccactatcatgaacacaatgtgaagcttatttctggccataatctgtatgacactgaaagaggatttatactgtgactcaagaaaatagacatggtctgttcttctaggagtttattttcatgttcatacatccataaggtgataatataggacaagaagatatctgattcctaattgcccacagatgtatactttagcaattgtccatgacactttgcaatccctgggtgatttcctgccatctcatatatcagtggtccctaacctttttggcaccagggaccactttcatggaagataatttttccatggacaggtggcaggggcaggatgggtttccagacgaaactgtttcatggttccacctcagatcatcagtcattcaattctcataaagagcatgcgacctagatccttcgcatgtgcagttcacagtagggttcgctcctttgagaatctaatgccaggggctgatctgacaggaagggaagctcaggcagtaaagctcactgctcacctcctgctgtgtggccagttcctaacaggccatagacctgaccagttgaggactcctgtcctatatcattagctgctgtgggtgagkttactatattaatattagtaattacctgaacaaaatataggaaaattgtgagatacaatcattgcattccaaagacattcttacgacactatcaatttataaatttcataagttttgggttatgtcgttcattttttacttctaggtaattgtattaatatagataatggggcaaactataactgtgtaaaaacacatcttgaaaatactgctttatatatgtctccagatattttttccatctttatatccatttgctttttattacctactgatctaccttatagccctccttaatttttttctttcaatgttttatttttgtctaatttcattttctctgattataaaagtaatatatatttgtagaaaaactgtaaaataaaaatataaagaaaaactactaaaattactgtttttcctaccacagagagataatyacttgaaatattttcctttgagttttttccatgtctgtatgtttattcatgtaatttggaccatactatgtgcaatgagagtttttgcttttattttttgctttagcattatatcttgagaattttctaatgttcttagtcttcaaaaacatgtttagtagctgtataatagcctatcgtataactgaaccataatttacataagtactttcctattaatagacatttatttttaggattttcttattgtgcttatacaatctttctgccttcatctcttgattatatatgtatttaatataaatgccaaatttccactgcctaatcagcatctcacttggttgtcttataaacattgcatatttaatatgtccaaacacaaactcttgctttttattcccagtctgtccttccatagtcttactctcttttttttgaggcagggtctcactctttcccccatggtggagttcagtggctcgatctcagttcactacagcctcagcctcctggggctcaagcaattcttccacctcagccttccaagtagttgggatagcaggcatatgccaccacgctgggctaatttttgcattttttgtagagacagggtttcaccatgttgggcaggctagtctcgaactcccaagctcaagtgatccccctgcccttagcctcccaaagtgctgggattacaggtgtgagctaccacacccagcttgtcttcctcttcttaataaatgacggttctatgggagctgttgctcaggtcacaaaccttggggtttgccttctctttttttccgcctttcatattctatatgcagtccatcaacaaattctgtgggttttaccttcaaaatacatccacaatgtgccacattccactaccagcacactagtcaattcatatcatctatcatttaattattgcaatagctccctaaacagcttccatttttgcctttgttactcatgctgcaccatacattactcttttaaattcagatcacgtcatctggagtgaaatctaaagcccttatttatgagactctttatgatttgactccagctggctgctctgacctcatcccccaccactcccttcactgatactcagacttccttgttacttgatcacagtaggcatactttgcttcaggaagtttgtgcttgcccctccttctgccttgaatgtttttcccttccacatccacatgtccacatggtttgcttttctttcttcacctctctggtcaaaagccattttatcagagaggccatctcagacctcagataaatatgagccatccacgatcaccctttcgtcctgtgttcccttttatttttctctctagtgcttattcctgcttgacatcatttttatttgagtatttgtttgttgtctgtcatcctgtactgggctataagctttatggctcagggacttatctgttttgtatattgattagtcccagcacaagtaagagtgcctggaacatatataatactcagtaaacatttgtgtactgaatataatataattaatgaacatttacagaactcttgatattgctatcagattgatttgaatttttttggtctcagtttacattcccatcagctgtatatggaaatgcttgttttaatactgtatctaatttaaatgcttatgtctcttaatttatctttaattcccatgttttctctttctccttttcctctacatttcttttcatttattttgttaatctctcgtttcatttattcaatctttcactttccatactttgatttattcaacaaatatttgccagtgtgtaatatcttcaaaaagacagcaaagtggaagtgtggaggggggggcaggcaaataaacccaaaaatataatagaggtgatacatgctgtgttggagagcagtactgaaagctatgtggagctcagaaaaggcatctaatccagactgatgagtcaggaacagcttcttccagggggtgactgagattggaaaagaacaataggaattagccactagtatctaagacttccttgtgacagcttcagtagggtccagggtataatgggagacaatattgtaaaagttacatgcaaggatacttaagcaggagttctattcattctgtggcccaagccatttgcttatttttgtttgtttgtttgttttttgagacagggtttcactcttcttgcccaggctggagtgcaatggcacgatctcagctcactgaaacctcrtctctcgcattcaagctattctactgcctcagcctcccaagtagctaggattacaggcatgcaccaccatgcccagctaatcttgtatttttagtagaggcagggtttcaccattttggtcaggctggtctcgaactcctgacctgaagtgatccacccacctcagcctcccaaagtcctgggattacaggcgtgagccactgcacctggccatttgcttgtattttttacaaacaatattcagggccagaacatcctcagttataagcagatattaattaaatacttcttagaattcataagaattgtggtaatagtgataactgatatttgtgtaatacctttcagtttacaaagtgctttgatatacattggttaatttgcatagtaattccaggaggcagctataattacccccttttacacgtgaggtaactgatgttgactaacccaaggctgactcagctggtaagtgatggaagctacaagmgataaaacattatataaaatgtacagtccatatagaaaataagaggtaaatagattaggcttaacatctgggaactagtctccaaattataacttataaaacttatggtgattaatcccagttgtttttaaaggtccattattgaaggccctacccataatcttgtgtaattcaatttttttcaactctagtatttctaagatatttatttttttagaggcaggaaggtaagtggaaggaagtagcatgacttttggaactggataagtctaggcacatgtcaagggggaaacacgaagatattagtcaaaagatacaaagtttcagttatgcaggatgagtaaatgctacaaatctaatatacagcatggtgactatagttaataatactacattgtatcctagaaatttgctaaagattaattaaaggctctgccattaaatagttctatgaccttgcactatttatcccttggtttctttacctgtaattaagagataataacttagttggcagggtagtgttgaaaaatagagataccatgtggaaatcaaataactggcatttaacgtatgttaaattgcttcctccttccccatcctcataggagcaacaattcttattttttattgttgataatctaaaaagacattaatccaagaaaatgggggtaaggaagggaaaagatcattagagttaaaacctatttgtgtagttatcacatacaacatggtattgaatcttaaagagctatgggaaaggaacaccatttattgagatctgcttggtgctggatacctttcaaatattatcacatttagtctacaatctcagttagtttacttggtttctacagtgcttttaaacccattagagaaaaagaatgtttcatactctcttgtaaattatttctaatcaacactggagaccatagggacaacaatattagaaaaaatgtaaaaattcattttgaattaatgttaataattactgtcatttattgaatttctaccatatatatgccagtctatgctaagtattttccataaaatatctcaattaatttttgagattggtgttattattttcactttatgcatgagtaagcagaagcaagaaagattagtgaaaagataagtatttgtctagcataacaatgtgttagacactctaagtatataaacccattaaccttcccatcactccatgaggtaaatcctatttttattcccactttacagatgaaatctaggcacagagcagttaagtccttgcctgcatagctagtaatgagcaaagctggtgtctaaacataggcagttgggctccaaaatccatatctttatgctattaacatgcagttggtatataacaaggtcaagaatcagaccaactcaagtatggcttttttttttttccagtactacataggtagcattattaactttaagatttctagaattttctctctgtttcaagctagtcttggtttttcttttacttagaaaggtagaactaaagttttatgtggttgcctcctcccagaaacacaacctgttccagaaagcaatcaacttccatggagtgctgggtggggagtcagtccttaatgcctgtcattctggccattacatagaccccatgtggctgccttaataagcatttgctgaaagaacttagctgtggttgtgagggtgtctcactgcatgtaaacatttaaatatccacccccatcctaggttttctttaaaaaaattggattgaccttgaagtagaacaatgtgagtcctttctcatgtatactccttcctaatgggaatgttatcaactgatccattggagcctgagattttattttttgttttgctttaatctttttctaaagtctcattttccaccttgagataagagatgaaggcaaaacgaaatagctgaaataaatgtgatagtcaaatatttcaaagccaattttgtgaagccttgstctgaatttataatagtactagtaaactgtcacagctatctagtactgcacagatactttcctgtttctcattttaattcctatgactttatacaaaatggacggagagatgccattatatctgttgtacagatttggaacctgagatgatagattccatgatttcgcctttgacaattagraagtaagtgacaaactcagaagccagaagccagaaggaggataacatcttggttaagagaacagatgttagactcaaaagagtctgggctcaccatttactagctatttgactttggatgagttatgtaacttctttgtgcctcagtttccccatccatgcctatgccacgggttattatcaggattaaataaattaatccatgtaaaacacttcaaacagagcctggcacaaaatgagctacattcagggtggccattattattattaatgttgacttttagtccaggaaaccatagtcattataggactggcttccgctgtgatgatagttgagctagctgggagtggtagagtgaggttaagaagtgaatgcgggggaaacactcttacagctagcctaataaaacatacatttacrctacacttgtacctgtattaagaatagattttgtgactttatattgattcagtgatgttttctctrtatttcaatgccttttaaaaacatatactgatgttaattaagaagaatctgtcaaaaaccaggcctaattgtaaaagtcatgcmaaaagaaaagtctatgttaaagaaactgattattcatttaaaaacttaaaaaaaaaatctagaatgttgagtaatcacaaatatttgcattccccaaatattcagatttcccattcaggtatcataaactttaaaaagtaaatgcagtggttatttttgtagaccatcattatatgagcacagaaattaaatatatgcatagcaacatctatcatgacgctttccagttcctaggagtggcattaattccatggcttcactgcataatattagtttcgatcatatactgtcgaagtttcatacagagtatacatctaaatccatataatattgagagtagctctaataaggttataccgaatttaaatttgtgagaactaagggaaactatgttggagttgcaactgagtgtggcactcacagtgagaatgtggtctgcctgactaaagcaaggtagggctatccccagaaccattgttttctgcagcttagagagaaatatttgtttaaattctgctaacaaaaattttttaaaaattatgtgtatgtgcacgtgtgtgtattcgccagtgaaataatgaaagtcacaattttttgtcttcccttgaaaaaagaacttaatatttacactctacaaatattaacatttatccatggaatataattaagtcataataagttagcacaataatttgtattctatagtaccgaaagagttaatgtcattcaaaaatgtgactatttccgacctttttcaaaaagagcgggtctaattgtagttctcaactctgatagcccattagtcacctgtgaaatctctttagaaaacagagtccttagccccatgccagatctaccaaatctggatgtccagggtggaagtgggacataagtgtcaaaaacagaactaaaatatccacaggtgattctgatgcacaggtagatttgggaatcactgkcttaaattcattgtgtctttgacctcagaaaatcatattaccagaagttggctgggtgtggtggctcaagcctgtaatcccagcattttgggagtccaaggcgggtagattacctgaggtcaggagttcgacgagcctggccaacatggtgaagccacatctctcctaaaaatacggaaattagtcagcagtgttggtgggcacttgtaatcccagccactccggcggctgaggcaggagaattgctagaacctgggagtcagaggttgcggtgagccttgattgtgccattgcactccagcctgggagacagactgagactctgtcaaaaaaaaaaaaaaaaragagagagagaaagagaaagagaaaaggaaggaaggaaaggaaggaaggaaggaaggacggaaggaaggaaggaaagaaggaaagagaaggaaaatcatgttaccagaagtaacagcaaaatgcaaaaagtaaaagcacattagaaaacacacacacacacacacacacacacacacacacacacmcacagaggcatttctctcataggmtaaattttcattaaaatagcggacgaccctaaaccactgagactactagtgataatgtgcaaagaaaatcattgctcctgagcaagagttaccaaacacagaatttgtacaacagtatttagattttataactaaaggcatcagctatttaaaaacacctgtagcggatatgcacttcactctataaatgcattttgacagagcattattttattttctttaaatccaaatatataataataggctctatcttgcctgccttttctctcagagctcaccctgagcatcaacagtttaggagctcagatttttgaggaacgaaaacctggaagagagaagtctttgggaaaattctgcttttcttctgtattacagatctctactgaggcaagggaatataaaggtctggttatctgcttcacacttgggaagaaaaaacaggaagctcaaaactcacattaatatttcagttatcctactccctcccacttatttwtgtatttatttatttttgagacagtctccctctgttgcccagactgtagcgcaatgatgaagtcttgggtcactacaatctctgcctcccgagttcaagcgattctgaagcctcagcctcctgagtggctgggattataggcrtgcgccaccatgtgccaccattatgcaaaagctatatgtaatatccaccgtgaaagtttgttgttgtacagattaaaggtgatggtatttgtgaccatatagtgactgagaaatttggggaccctccattcttgtaataatctagaattcaaccatttccctcctctacttcaccatctaaaaaacccaattccagattttaggcaaatcacatagattttatagaatatttcttaaggagacaaaagggaagataatggggtgactttgctccaaattctatattctgtataccaycctgctgcacggagttattctgggctgacctcaagattctgtggagcccgttggctctttgatattttgaccattacttttcactgtgcctggcttttattacaactctagcagttttgttgcctggtgtctatctaagctgtgattggaatgtattgtcctaaaacttctctcatctgttgaatctattccggattggttagatataatagacagaaggtttggctctattgctagtctttctaaaaaatctcttccatctagttctgttattccctgtgtcctyattccagtagttcacttaacagcacctctgacttccatcggctrtactgggccagtcaggatcggtaataaagcacagttttctctagatcctcacaataggcaattaatgctgtctttcttgggcttcatgactagtcatctgtccctcagtttaatttgtgatcttactcaacctgcatgaaagactttggccaacagtgtacaagaaaacagctcttatttatttatttacttacttttcaaaaggttttggcggaacaggcagtgtttgattatataaatacattctttagtggtgatttctgagacttwaaaagagcataaacgggaaagccatatgtatggttgccttaagaatgtgttttgtcagtgagggaagagtgtctatttccctcccataatgcttagtcatttttagctttattttgtcaaatacatacacgcatctccaagacgaagtaatggttgagggaagaatttatgtcaagagcagatttttatcttccatatcacataggttagtatctggtatataaatatagttgtttcctgagtatgtaccatatggcaggtgatttgtgaaggctttgcgtatattatctcatttaatcctgtagcagtcctataaggtagatcttaaaargccatttccagataaggcagccaagattcaggcaatagagatacttccctgtagtcacacagataggtggaagaacagtatttgaacccagatcttctagcccaaaagcttgcgctctttccaccatgttcatagcctcccaatgtgttttctaagggcagtaaatatgttragtgaatagatgcaccagtaaaaaagactatacttgctgtaaatttgctttaattttgtgtcatcttttctataaaatggctgtagctagcacataatttccccgaagtagactaaactttaagtagaatcttgttagtaacagaatatatttgcataactgaagacatttgagattgacaaatttaaatagcaaatatggtgataccagttaagccatcttgttagtcataaccagttatttataatgaactttcactattctcataatgccatgttagttagtacctaggcactacatagaaataaaagttgctcattaataaggaaacagtactaatttgaaaaaatacatattttctgtttctgggttaagaatgtgtggatctttggggctgaattgaaaagtacccaatacatatccctaacagtcctcccctggagttacaagaaaaaatagttttttcctccagctttattgaggtataattgacaaatttttatatatttaaggggtacaacttgatgttttcttgtgtatacattgtgtattagtccattttcatgctgctggtaaagacatacctaagactgggcaatctacaaaagaaagaggtttaatggacttacagttccacgtggctgaggaagcctcacaatcatggcagaaggcaaggatggcagcaggcaaagagagagaacttgtgcagggaaactcccccttataaaactttcagatctcatgagacttattcaccatcatgagaacagcatagraaagacctgcccccatgattcagttacctcccacagggtccctcccacaacacatgggaattcaagatgagatttkgttggggacacagccaaaccatatcacattgtgaaatgattaccactaccaagctaattaacatattcattacctcacatagttaccttttttgtgtrtgtggtgataacattcaagatctatccccttayggggtacaaaaaatatttttaaaaaattaatttaaaatacaaaaaaaaatttaaggaaatcaaaagtacccataatcccgccattcagagaaagcactattaacatgttggtaacttttccatattaacctacagatgtacagatatgcctcttacaaaattggcatcaaactatatatacagatttataactattgctcagtttatgtcattaataattcttaatgtcatttagaaaacatgaaatagtgggagcaaataaaaattttatgtagacatatcattcataaatgatattgaacaaattccctggcgtatgcttctagactctttttaatctcattctctactaagtaaaattgggatcgtacttaatattttttattattcacaaaaactgaatcaaactgtatatatattattttaactcgattttttcacttaataatatggtgtgtctatctttatatgtcatcaaatttacttacataggaaagtttttaatgcctacattaaaactgtattcaatgctaatgaatttttttcacttaataatatcttgtggctgtctttttatgtcatcaaatttacttacacaggaatgtttttaatgcctacgttaaaactatattcagcactaatgaacataaatattttttccagtggtttgcttctacaaatgctgtgacaatgacaattctgtgaacacctattgtactcagttttgtagaacagatttctggaagtaacatttctgaactgtaggttcagcagtttatactaccaacaccagtgtgtggagagtgtttttgcagccattaaagaaaaggtagccggtgccatgtgtactgacacagaaaaacgtctaatatccaatgtgaaatttaaaaataaaagcagtggcataatatgtataatatgagcaacttttattttaaaattatctatctgcatgcttatgtatagatttgagtatagatgtgtatatggggatagatataaatagagacatcttaatgagcactgaaaatacaaaattaagcacatatgctgatttaaaagcatgtagcagaccgggtgtggtggcttacacctgtcatcccatcacttggggaggctgaggccggcggatcacctgaggtcaagagttcaaaacaagactggccaacatgactaaactgtctctactaaaaatacaaaaattagccagtcatgagggcacgcacctgtaatctcagcttcttgagaggctgagatgggagaatggcttgaacccaggaggcagaggttgcagtgagttgagattgcaaccctgcactccagccagcctgggtgacagagcaagattctgtctcaaaaaaaaaaattaattaaataaataaattttaaaaacaaataaaagaacatagcaaactaaagggagagtcagagtaaacaagtaaattttattacagagtaaatgtatatgctggaaggcaggttactagcaatgcatgggaacttgcaaggtgatggggctggcagattgccaaataaggatgcccagttaaatttgaacttaaataataatcaacaatgaataagtttcagtataaatgtgcctcatgtaatagtcacgtatttatactaaaaaattatttgttatgtttccaaaatagaaatgtaactggggcatcctatatttttattagctaaatcttgtaaccctagacatggccagaaacatggttttgtcctcataagagggaatcgtctctcatgaatgaattcacatccacagacatgacaagagagatgtataaaccggatggcctacagccagatttcctatttaaatatctatagtagtcaaaacatttactgattgtcttctaggcactgtgctattcatgcatcatttcgtctaatactcgtaaggccctaagacccaagcactattcctgggttaggggaggaaactgaggcatagaggtaaacaacctgcccaagatcacatgtcttaaaggaatagggccggacttgaatctagatagtgagaatcacagtttgtttcctctgtcctattctctattgcctttaaaataggaggtataattgctaatatgaccaagaaatataatcagatcactgagggcaagtatatactacagaaagtgtttaaaacaatgacaacagaacacttagtggtttgaacccagacaatctgggttcaaagccaagcgctaccactcacaagtcaggtatgtgaggaggggcaggttaatgccaacctttgcagataatagtattgcatatgtcttaggtttcatgggaggattaataacatcgggtatataaagcatatgtagcacagggccagcttcatagtaagttctcaagatatatgtgagttgttattattatttaaaatacatcaaagtacaaaaccaagtggcaatcatgaagaaatactgtatgggagttaagaagagagaaaaatctacaatcaggtgtactcaacagactttatggagaaagtaggagttagaccctgatagaaaccagggactttctaatgtttaggggtggaaggaaggaccaatatatgtaaaggtgcttcttagcaaaaagccttctctaaagagagcaaggcagtgctacaacaatctcttgttcttatgcatgtcttatccttccctcatggccaccaaacaatcttcataacctgtttacagtaacaggcacagaagactaaatggaaacagctgcatgaaacagagggaaatgtacctcttccaaggaatgtgaaagaaatccatttaagtgattcgattaaagccaccttatccttcctgttcacaagtagagaattatatctgaacattattttgccatctaggaagctgctgttatattcagtcttagcatctattcagttaaaggtataagagtgttcccccctgtagagtttgtcttagtaatgtaaaattggcctacagaagtatatagatgaataaacattttgaattctactttagaaaatgtgattttgctaaatatattcagaaattcttgtggggggtgtgaattttaaaacccaaagctttatcagatttggcaactttaggtgttactaatgtcaatcatcctcgagcctccgaggaaagaaaagaattattttagaggtagagtatttattctgtaatattatatttttgacaccatgataaaaagaaagaaattgtaggtgatattaagcttcagaccttctctttgggggcctttgtaatgttcctcacactttcctttctcttttgttatttccaagtttttctcaaaaaggaatggccttgctttttttctctacactgtggtttcatagtactggctaagaatatgaagatgtggggagtatactcaacagaacaaacctgaaaataccagtgggatacccagcttaaacaattgtgccctgcccaccggtctgctgaaaaagcaaaccaaactcataaggaccaggtcactcatctgctagcgagagctgaatagacagggagtgtacttggcccaaaggatgccaatccagaggctaacaagtaaccaataaggtggtttactcaaaaagrtgtactaagtccaacaaatactcagttaggaatgtttaattgaaaagcagttcaaccgaggcaatgatcagtgaaaggggaagctagtgatttatgaygtaaaggaggcccgatgatccattgtgagtctaatgccagctgatgtcattacagaacagaaactgagggcaagaagaagctatcaggtagaaagtatctcawttataaattagaggtcaaagtggtgatttgagacagaaggaacaagtagcacaaaagaaacagcgttatcttgaagggaaagctgtagagatccagctccttagatctcactcttccgtatttatcacacagctttttctgggtttctatgcacatgtgtcctgttacctaaagtagattaaataagtctctgttcctgcaatcagatttccttacaaacaaaatgtttgttcaacaaacaaagggaccattttttaaattgttttactatatacctgccacaaagtaggtttttggtaaatatttgtggaatgaatgaatgaatgaatgtacaaatgaatagccaaaatgattgtactcatttaattccaactagtaggaagaacactrtcttccataacttcttatcaactatggattttaaaattgtactcaagacctgcctaacttttcaattatctactcaaaccattaacaaactccctaaatggaacatgtttgcagattcctctttaaatctgcacgtgctgttaccactttctagaaagccctctttcacccctttcactctctttctcccttttcaccctctttcaccctttcaccctctttcaaacctgcactagaattgctactctcagcagtgtttactttcacatattcttagctcagtctctctctgaaatggtaagagaattaggtgctttcacttcctgctgtccccacagccccatatacaattttgtatttaactttattcaacattataaaataaagcattttcctgtctcattaaaatgttttatgaatattaactttaatsgttaaacaataaaccgtcatgtgaatgtgtcttatattccatacccttcttttgctggacattttgattgttttgttttattctgttttgctgttataacaaatcacaatgactttccttctatagaaacttttgtacatattttttatttttcttcttcagatagcacactagagtagaattgctgaaccaaaagacaggattacttctaaaactcctgaaatatattgccaaattgctttcttgaaatgttttaaggaggttttacactccatagcaccagcaatatagtgtctgtttcaacataccacaactaaattgtgatttgtcaatttcaagatcctttttttaaaaataggtaaaagggatgtatcatttaatttgtgttatttttattcctagtgaggttatttatatgtgtgtgtgtatttgtcatttgtattttctcttgtgattggatactaattgtctttgttttytactaaaatgttattgcatttcttattgagttgtaggagcatctttaaaatattgataaatatatttgagcaaatgttttccccagcttattgcttgtttatgagttcttgcttcagtggtttcaattttttttttttttttttttttgagatggagtctcactctttcgcccaggctggagtgcggtggcacaatctcggctcactgcaaactccgccttccaggttcaggccattctcctgcctcagcctccccgagtagctgggactacaggcacccgccaccaagcccggctaattttttatatttttagtagagactgggtttcaccgtggtagccaggatggtctcgatctcctgacctcgtgatccgcccacctcggcctcccaaagtgctgggattacaggcatgagccaccgcgcccggctggtttcaaatttttatgtagtcaaatctctcatcttttatgtgattyctcctatttatttcatgcttaattttttttccatcacgattcttagtaactactaacctgacattttgtagatctatatttatcctatgagttcaattaaaaattttttaaaaatcaatacaaagcctttaaaagcaggtttacaaaagtgtaagagtttaaacactagtataggacatattgaaccttcctcaaataattcaaatccatgtctcaacggccttgatctggccataatattgaccctgtgactcttagactatatttgtttaaacatctttcagaaagccacaaaaatwctactatagctggacaccctcacccaataccaaaaacagagatccctctcccttttgttacaatcaccattgtcaaggtcattaatattcaacttcttattccaatgaaacactccataacccatttacaacccactgccgtgagagagcctaattttgttgaaacccaaacactttttaaggaaataaagcatcttaatattcaaaacaactttaaatgatgcagctcttactctgccctttgtctcctcaatcttccaataaactcctcaataaacacagtaaaatataactgagagtgatgtttacatagaaaaaatagtgaaccaatcctaatttctacttttaaatagtaagtatttgcagactgtggtatctaaactattattaataacaaattacttatgacccaacaatctgatgtgataccacagctgtgaaccatacgggaaagcaaaccattwtaaagatccaggtacaaatcgggcgttagagttggggctgctatattgttagaggcagtgaaaataattgagaagtacagagaaagtggtcatcaacctccagggctattaaagaggatcaattaccttttaaatatacagagcaaaagtgagtctttagaaggcacctgtgcagtaccttttgcgagactaaaagccatcgattgttacttccttggttcaaccctcttgtagagaattcacattacatgaaagtgctatcgtgtgaactgactgattctaagtgagtgggtgaagaatattatttgtaggaattctcacaaaggggaccaacattttctgaggttatgcatccttgtgagctcgagtgtctaagagtgataatcaagataataataatggctcctttttggtgagctctgagtaagtgccacggactgaaytaagtgctttatgcacattgttcctatttctcacaatcatctttaggctgatattactattcccactttccagatgaggatgttaagaaatagcataaggtcatacaaggtagaatttgaaagagccagatctaaacctagtttggtttgcttgtacttaacatggtgctcataataatttaggtctgtgcataattttgcaatttataatttttctggtaaacagaaaaatctttttaaatattattttaggtctataaatgagaaagctaagatttgtaagagttaagtaagcgtggcgcaaataggcatctactccaactgcccccgtggaaattcttgagtgcccaattcagtggtgcttggaattaggggagcgaataggttcttacaaatcacctagatcaatccctcccctagatgtctctatatcatactttaaggcctgtataacaccttaatcaagtgactaatacctttctgcttaaagttcagtataagagaagtcagcctctttcttaaccatttttataatgtcatttcacatgttgagccacatagttcacagcctgatactaattctcttttatcccctaattacttttagggcttcccaaaatcccacccttaagagctattagcccaggactggaattcaatcctcttatacttttccaaatccttggcccaataaacagtgtattatttgtaaagaggagcatgaggcacccttttaaagttacaatcctttttcctcaaatgrtatctggcaatatattagatacttaggcatctgagcccttgacgtcccagctgctataattaatgcagtttggttctatattctgcaaatacagggcatgcggttggatgccccctcctattatggcaacccaagaaaaccatagcaggataacctttggagaatctgaaagttctgcagatttagccatatcagtctatatgatgaagaaatttatgctcaaaatcatatacatatatgacccaaatccatctttttgtaattttagatgtccccttttagttctggctcgggaaaagagaataaaaggtactgatcacttttcatttcacagttcctttcattttctatgacagtacttcagtaatacattcttgcattgaggaaagtaatggggaaacaaagacacatgagatttggtcctgatcctccagggtctaatattctagagaaggagagagcattgtgaattaataaagacagtgcaatgaggtgaggtccctgcctgagacagcctgaaggctttgagagctctttggtagggagttagaaaactcaataaagtgtaagtcactctcattgttatctctgagagaagagagtcatattcctttgaccttgtaggttcaggtgctacacagatgaagactatttacaatcacagtcattattatcactgtcttaaacattatctctgatacagggcagggactatagtgaggtgagtgaggtactcatgttgggtgcaaaatttaaggggacaccgagaaacagcaattaagacaaaaatactttaatgaaatattttagaaaataaaattaatgcaaaagaatttataatgaacaaaatatcaaacttttaaagatagagtcagtctggtattagtctcaggtactatgtaattacatagaggcccaaggttttgtctgttggctttgggaggcatagtctagttgaggtgatatgaaagagatgtgaaaataaacaaggtgcctgttttattttcactgtagtgattgcaaacatgagatcagatctaacttccaataagggaacagggtgggagatgggtagctgattgacaactaatgtcatatgggaatcatcaaagaaattcaatagcatgagctctcataaccctgctgtaagaatgaacccagacagttattctagactcaasgaacctctagacattttagcaacaaaatttgatagagcttcactctggtgctctataattagtggacacagctacagctaccttctccatgtttgcatcttttcctttttctgttaactgaaaattttttctcctttattcacattattcaccttccataggagaatccaaatggcctaggccttttttttctctctttcttttttttgagccccaccatacagatcatggttgcaaggtgaggggcccaatcctaatccaatggtctaaactgctttgtttagggaggaaactgaatttgatagtgcaagtggtccaaatgggaaggagcagttataggcaaagtagttttcctaagaataaggtatagatgaagcacctccctccaacatacaccagtattgtggattagcaattaaaaatgacaaggaaatagaacaaatagcaagtgctaatggagttcagagaaaagagagatcaccaagggccagggtgtgctaattatatgctataagaacctgcaattataaacccatagatgtgcaaataaatgctgatggctcagcagatgagctacaacgtcattatctatggctctttataaatggacagcaagagaaatgatttgtttataaattcacttagagattgtaccaatatcttcaaatacttttccctccctctgtgggcatccacagataggcctcttgggttggattttcatattcactaccttctgacctaggccattctggcagtttataataggataagcaggccctttcaattatgactggctgattcacgctgccaaaartcatttccccttggcacttccttaccaactaaatgggaagtgatagtggcatctgttctgccacccagatttcagtgatggtttataaaacggcatttcttgtttgtctgatgggcagaggtcacacagaatataactgcagggaaagactaagaatgctggctcccagtattaggccttctggaactcagggccgagaagtctgtgaggagcccactgtgcccattggagcgactctcacaggaactatgggcaggcatttcagtggctaaactcaaacgcacaagaaacctatccctttgagggcagatgaaccatgcgcacatgctataattaagtacttaaagccactcagttcatgataacattgggattctggttcttctggtataacctgtgagaatttataatggcctgaaaaatttagagtagcttatggctcccttgaaagaaccagaaggttttttaaaatttccctctgcaaagaatggctaaaaaaaaaaaaattatctattcattcaaacatttaccaaatacctactatgtgccatttctgtgttcagwytgtagcctatgttgtactttctgtatactgtactgtgctctagtacataatatacatactatatgatagaatatatgacagaatcctagcgctgtaataaaaccattagatatgccgggcgcggtggctcacgcctgtaatcccagcactttgggaggcagaggcaggcagatcatgaggtcaggagatcaagaccatccttgctaatgcagtgaaaccccatctctactaaaaatacaaaaaattagccgggcgtggtggcaggcgcctgtagtcccagcttctcgggaggctggggcaggagaatggcgtgaacccaggaggcggagtttgcagtgagccgagattgcgccactgcactccagcctgggtgacagagtgagattacgtctaaaaaaaaaaaaaaaatcttcaaatgtgaaccccatttttatgccacttgaaaggggatttttactgatatttttaatgttgtttgattgcaagagaaccttgtcagtattgcaagaaggctttgtcaaatttgtcaagtggtttgttatgttttggtatactttcatctactcatcttctgagatattaagtgctctcacaatcaacaaaagaaactggatgtgatatctctattctttagccagtgaatgtacaaaataacaagtaaataaataggtaagaaatagaaggtgaaacaaaggtaaaatgaacctgcgatatcagtaactgtttctctgtgttgataagactttgaacggtgaagaattaagcttagcaaatatcagtccactatgaaaccatcctgaaggtgactgaaagcaaagaaataagagccttcttctaaaatccgaggtattaaagcctgctccaaacaccaaatctattaaatatgtgaatcaaacgataatattatattcacaaaatggttcccaaaagattcaaataaaagtttcaagagttcaaccctggacaaaatacaggatctcattttcattggcttgaatttattgtaattttcagaaagtaaaatattttcaaagagaaactgaataaagaattcagttaaatacaatataaccaggaatttttaaaagatctccattagccagctttgattgtgaaaatgtgactcagaatatggtgctactgaggtaaaaggactaggagaaaattggaaacatcattttcttagtctgtagagtcaacatcagactgagaaaattggatcagccctcccaggcagaaacaacaatgttaccgaaatgacattatcatgagaatgttttatgatctaaaagaagtcattgaatcctttcttctaaggttctgtgctggcagtttagatcagctaccattttgtgtataataatattttcaaattaagatgcagaaatttctccaagtggtcataggaccaaattatatggaaagaaaataacattctttacatttcctatgtatacagaagatattagatggactccaaacataattaaatatattagcatttgtagtaggccctatttatactatttctttgtattagatgtgcagtcttaaattttgtaggagtatatctgttaatattaggtcctatttatataagaaaaaaatgatcctagcttgaacaacacagtttatctttatccacatagaaggaattcaaaggtagctagtccagagttggtatagtgccactccatattatcagtgacacaggttctatctttatattccactatgtgtattttttggctttatcctcaagtttgcttcatggtctaagatgaccagtgaagctccacccatcatgtctgtgttccaggtaagtaaacggaggaaatgggagagaacaaaatttcaagaattctggctaaacgagcttccttataagcagctattctagttcacaaaatacttcagagcactcacatcacattggactgaacattttcatggggccacttttacccacagaagagtctgaggaataaagtctttattataagaaaagttacaagtggaaaattgggtttcttttagtaacaaatcaagataaaatggcattgtttttacttttgcacatgctgagatgctactggttgcamaggtgttccttgtatgtactaaccatgcatatctttctcttcctcttgtatcaccaggcctccggaacctgtttacagcactgtgaacaaactatgtgataagcctgcttctcccaggcactattcccctgttgagtgtgacaaaagcttcctcctctcagctccctattcccactaccacctaggcctgctacctgactctgagatgaccaggtactgcatgcgcttcctcacttcatcttctcgaactgcatgtgcttccacaaggataaatgggtagaatccgcctctgctcacttctcttgcactaaacatcttccccaaagtggagagatgttctgctgttcccttggtgcaatgggagaaattaagaacattgcctttttgttttgttttattccctggagtgatcacagagcacttagacattgatcacatgatgctccacatgttcctggttcctatacattttaataaggcattcattatatttttccagaagaattaattttggaacttaacaccatttcactcatacagaaggatgaaagagaacatttgttgaatatttttaaataatatttaataagtgcttactatgctccaggcataacatggcctaagaaatatgcactattatcatttaatattttaactaaaatattagattaatatcaccatttaactgagtctttaaggtattaagcaacttgtccaaaactacaggattagttggttccatctcaccacacggaacgtaaaattaatgtttatattatgttaccatcctatgtatgtacatatatatatattctcttatttaactgctcccagcctattttaagaaatagaagttcagagtggttaaaggtattgccctcagtatgatcttgccaataaatgtagagtccaaatttgaccttagaatgttttgagaatgttttgagtctttcaacaactttgtaaagaaattattctaagtctgaaagttggacacaattctgtgttagtattccaaagcctatatatgataaataacaaaaaagacctcctcttttcatartagcctgagttggagagagaggaaagcaagaaaaatagaattcagcgttccacaaggtagttccaattcagtctaaacagagatcccaattgtaatgttcctacacagaatggggtgtctatatagttattttttcagacaggaatatcttcataatattgttagagctgaaaaaatacagactttagaacgattcagagtgaagatggatatatcaagagggtctgctaagaatatcatctttattttttgatactttgaaagaataagtttggaagtcaattactgttctctctaggagagttaaataacaaattttaaattacatctaacatttccagaaataaatgagaaaacacatttttgactatgtaaatcagctagggcatttttttattaatttgcaataattaaagtctaactaatatttcagaatactttataaatattcattaagtccacctatatttttaacaaatcattaaaactatttgttgatacagygaactatgccattttaaagctgaaaggtcaaagtcaccatagccgtaaggaagtgagaagagccacatacctgtaatgacttgctagtaattatgtacctatagtcagctacataagggtagctaacatttattgagctcttctgtgccaggcattttgttaaatacttcttatgaattatttctcttaatcctcacaataattttttgaggtagatgttattattatctttgttttacaaatgagaaaatcgagacttgataagttgcctgacttgcccaagatcatccattagtaagtgacagctgggattcaaacccagatgatgactgacctggcagaccattagccatttttgctcactggaaaaaaatttccccccatttctctttttctatcctttccctatctttatcccgacttctcatattccttcccttcttctggctctgtgtcagtaaatattttttttctttttatcctgtgttccttttttatgaatgtaaaagttacattggtttccttccattccaatggggattttgaagcatccttcctgaaaaattcacgaagaagtagctgataacagttcacctctatgtgcacctgccagatatgattcttttcagcttgctttctgtcatctgtatcatgaataccatagttatttatttttcaaataaaaacattatagtacaatgttgaatttttttttcaaattacacaccctaattctgatatgcaccaggccccaacccccatccaccattcccctttttgggtattctattttcaatttattctaatttggtccccttctttctccttctttttttctttttccattatcttattctttatcttatctttgtagaaaaacagtcatagacacacaaaaacacacagacagctattttagtggccttgtcactaccagtgcattgacaccaaaaatcttaatttcaccccactttgctcctcctccatacttcctcaacttagtaaatggcacacacatctaccgcattgttcaagccaaaaacttgagagtcatccttactatgttttccctcayatcygccattcaattcatcttcaagtcctgttgattctacctccaaaatatctcagatttattcacttttctttacttctatttccaccactttaatccaagcccccatcatctcccacctataatagcttcttaattggtctcaccatttccactgttgacctccaggcttattctcagtgcaaccaaagtgatctgtaaaaaatacagatcagatctccttttgcattaggatgcaatgcgaagtcattaacatagcatccaggctctgcatgacctagccactgcctgcctcttggatacctcatttcactcttccctttgctgaccacatattcatgttggccttctttttattcacaaaatgcmctaaatctcttctagtctcaagtgtttcacatatgcttttccctggaattggaaagctctttttacactttgcctgattaatttctggtcatcttagatccaagcttaaattgcacrtcttcagagaagctctctaaaacagaaaatcaggcccccattatatattttctttctatttttcataagactcaagcaatttataattgtacatttatttatgtgattttcatgactgtatcacctgctacactgtaagcgcaatgagtggaattgtgtatttttgggcactgctatattcctaacagttagtacagtatctggctagcaggagctcaggattattggatgaatacataaacatggaaataaaatctgcaaacaagcaaactgttacctgtttgaaaacaagtcgtaagctcaagctgcgctttacctagttcttagtaggtatataaaactactccatgaatgaatgaatccatgcatagaaacaaataataactagaacttactttatgtcgtactttcaccataaactatgtctatggtgattgtctacattataaatccattaggcacctgtcagttcttcgtgaggactcagtaattcatttcagatattatttatttttccaatgggaaatacctctccaagccactgtatcttgaaatgcagccaataattcaggggcaaagtaaaatattctggttccatttttgacaccatcacctgtgtgctgttctctgtgttcttgaataacatatagaccctcggaagtagatgagaacttagaattagatagaaaaacccttatccaactctagtaatgttgtggaacccaatctactatcttcacagtctacgtcttattacacctcatggttaaatataaatattctagaatcttttgccctaaaaaagatattataaaaatatatctattaatttatttagctaagccttatcaaggatcatccacaaagtgcaagatgctactataatgrgacaactttttacaaaggtgcaaggtgaaaaagccaaaaatgttgaagaaatgcctgatttttaggatgcagtagataatgatgtatattttgttcagagcttttgaaaaattcctgaagtctattccagaaacttgcccatattgatatagcagttatggcttcagattagaatatgcactagctctggaaaagttagcatgtgaaaccatccttacatttacatcagtttaattcctaatccacatttagaagaataaaggttagtcagcaaaagcaacctgagtcagtcttctgtattttctgagcttcagtgggaatacccaagttctcagctctttgaattaatagcaaacattcagggatgaattaattgtacacacaatttacttctgtaagaccgtttaaaagaaaacagagaagttgttagtttttcttaggaaagcactttaaattacttggcacagtgcctatggctgcagattatgtttggaggaattgacttcttaatgcttgcagaagcaagaaatgtgcagagcctgaaatcaaactaaaatttgaaaaacaaataggatttctatgggactcctgcttatctagtacatctctttttctttgaaaaaargtaattttgatgttttaattggtttttctactttgggagartaagtttttcagcttttgatatttctagggcaaggagaatagtattcttggctgttttatcaatatttatggcatacatttatttgtccttttacataaaaggtcctaattattgttattttgcagttgataacagagkctgagataaaccagatgaaggctaattaaaatatattggcaggttttggatgggaaatgaactgtgaagcactatatygtcataaaacatcttcactcactgaaggatatatatattcatgggacttcaactagttaccaggcatcatccttaatgttagggattcaaaggtgaaaaaaacatggtctctccccttaaatatctcacagacatataaatgaagaattacttaccatgtgatatatatctgctaaaaggcctcagtttctcaaatgtacctaatctctaggtagctgttaaaataacaaatttaaagaaattaaacttaacagagtttatytgagcaaagaacaatycatgaatcaggcagcactcagaaccagaagaggtttagagagckccactgagcagtttgagaagcaaccttttatagcctgtacacagaagcaaagcagagaaatcacctgatrggctacagctaggcatctgctttatttgggcayggtgtgatgagttggctgcctgcaattgactgaaacccagctgcttgtgagtatctgaaacgctactctgtgtaacacttctaagttaggtttcagattgttatgtgggaactcrgagtatggagacagcgttaacctaagggcctcctgcttatttaatttagcataactacaatcagattattacaagcggtagtgttggaagcaaatatgacctcagactgttccttctgcagaggcattaacatacacaaagaaatggccccgtccacacctagccatcaatttctaatcatgtataagaagcattatctatgraaaatgcacactcatcttctcataggtctaacttctaactgttctctgctgggctcagagaatccrcatttataatttaccacctttgtagaaatcataacgttggcagcctcaagccattcttagttttgggatgcagagcaagatctttattttataagacctcaatcatatgccagagttatggtaagcccctgaatagtacctcaggctgaggtgagaatgaattttaatttktattaaagaactgttataaaagactgtttcygttcatagcttaatagcgagtccagtgaattgtgaagggagatgaatggtagggttggcagtatgggggaagggctgtgcaagcctgcctgtatttttatagagatctaagtattttacarcatgccattttgttttcattaaggcttcaaaatttacttctcagagaagagaaagtaaaccttccattttaaccctttaattcagttctgtagactatcagcccatatgaagttataggatcccttaaatgagtttttaaagtcagcaggtatatgtgttccaaattgaatactaaaacttatctttggcaagctttctttccttgcagagtggcagaaaatttactgggcctttaatgttttaactgtttcaaagtctgtaaatacaaaatcaaatacaaattccaaaactaatctctaatagaagtgcatgtaagtctctaaaggtaaacataggaggaattacctaactctgcccttgtttttctgggcattwtcatgaagacactgagcttatcagtaggattagggaagagatgtgttccaagtaaaagaaataggaataagttaagcatcgtgttatataaaggcacacaatgccttctgggactaccagactacctgtgtggctgagggctattgggtgggtgataaggttggagaaaaaggcagctgtgtatcatagaagaycttacttaccaagctgaggattttgtactttatcctataggcagtggggagctgttgaagagttttaaagctgagcaaagacacaagctgctttgcatttttaaaaagatcactctgccacctgtgtgggaaaagtttgaatgcagggaaactagttagtattatawtatagagcmgggttgaaataatgaagaactgaactgagactatcgagatagggaggtacaaatggattcagaactatttattaaataaaacaggtggtacttggtgactgactcaggggaagaattttctggcttgggatatttactggagggtgattctttgcccctgttggacagaatgagcactcttgtccacaataagtacacttaaacataaaactctttagaaaacaatgggagggaagggagacaaaatatatcgggtcccttgtttgaggtagtggcaaggtgaagtcacagaggagctaaggattgtgcccgaactgtctaggtctgaagcctcccatttggccatactaatcatgtgcattttagctaaacatgttaccaccctcagagcctcaaytccctcattagaaagtgagaagaataattgtatctgtgctgttcccctcataggattgctgtgatgatcaagggaaattgagcaaatgaattttcatccaggcactagccacattagtcattattaattgttcccatatgtgtattctattttaaagccttgaactcatgtatattgatktttgttgctatcacaaatcaggtagaaaatgtttatcagttcaggcaaatcccctgaggtcataagaaagctgtttgggctgagaccttctatcattcttagcagccatccttcttgtcatcataatcaatgtcacatatttttccttttattattacgtttataggctccctgtaaayggcagcatgtgtctaatcccatatgtgattttatacttatatgagatacttttctatctactcatagtggtatttctgtcttacatgtttcttctcaggagtgtggacaaaataatagccgctttatggtacacagatcagtagccaggcactttacataggtagtttattgtttctaataatctcattaattttgcaaagtgtgtgttttgatctagcaattggaggaatctgggctgtacccaaggcattctcacatccaagctcatcttctcacagagccttaatcacgttcactctgtacactgtagcttytcactctgttccccacttcccacatccactctgccacgaatctgtagattctgaaaggaaatttgagccttgttcacacgattcaatctgggaaacagcaccattagaaaaagaaagaagatgcttacaaatcagtgaccttcttatgcccttaaaaggctgatataatcttaaagaattctttatttcacttttaattaaaaccaagagactgagccctctgagaatgactcacaaggcatagcccctttctaagtttatgtagtagcttatttttcaaacgctgtcactsccyyttttgaagtaggtgatcactaaacccaatatgaattaaggaaaataaggagagattaattgactcccagagtgacagaggccactcttgctacatttggttttatagcctatttcctctgcartgcaatctgtgaaagggtttacatggaaagaaataccccttgattttatattaatgcattgtctcaatagataatttcttaaatttacagcattcattgttgtccctcactattttttgatactagcgrgaagatattctttcattaagaattcaataattgttttaaaagcacagttaacattttgtaatgtaaaggacaacagaaaacaaggaactcaccctgtyttaaaagctcttatttactctgcacaacaacccaggcaggtagagtcaggaggcttcatgagggtcaaataccttgagataacagagytgggaagtgaaaccagattggttttactccagaattcctattctgtgacgttcaaataactccgtgataaagcaatctaaatttaattgattagctttttaaaaaaaagttaaaagtgagataatatctctatctgagatgatgtgaatattttctgttagttttagtatgtctgtttgtgttttgggagcaatctttgtatttactttagtaaccatcaaattattgggtagcaataagaaaacagagaataagcacagcttcaaaagcattcctttgtgarggaaactacctatgagaaaattctatgcaaaaatcaccatggcaacaaattgtaggactcagaatcaagatagtaacgttaaaccataacacccattgcgtagatattaattaaaaccactgatgtgtattgggtgcccttaggtgctatgcgctattccagaagttttatatgtaccaactcattttaaccttataatgacttatgcggtagctatgatcatcccaattttatggaaatattacggtacatggtttgagaaacaaatggaaacaatgagatgagatagttgcaaatgaggtcatcagaaattacacttagaatattaattttatttgagcagaagttttgttttatttatcattttattccctgtgccaaaaatcgtacctggcatatagtactaatagtaacaatgacaatacagatgatgatgatggcaactatgaggataatgattacaacaatcactgtttatcatcttgttacctacccagcagaactttatacaaattaactcattaatctccacagcaacccagggaggtatgtgttattattatcccrttttgcaggtgatgaaacagttagctaacctttctaaggtagaatttgaacctaactaggctggtactagagtctgtgtttttaaatgtgcttaataaatattgactgaatattatagtagtaattcttcaagtattgaattctgcttcagagraaagtacaccccattaaacaatagtcacatctttttagtagataggtgatatatcaacagatgactgattgatatatgaagatagatagatagacagacaatgaatatatggttaggaaactagactctagaacacaaaatattagagtttgaattttgcctccacaactttctagctttgtaaacttgagcaagggacttttctaaaaggtagcaattattgtagtatcaatctcatgrggtacctataaggatttcaagaggttttatataaagtgctgagagcaatacctgataaatatgaagtgctccataaattttagctatcattatatttgtatatgtgagatgatgtattrtgacccccccaatagatacctcaggctgaggtgagaatgawtttttttcaaaagactgttataaaagactgtttccattcataacttaatagtgagtccagtgaattrtgaagggagatgaatggtagggttggcagtatgggggaagggctgtgcaagcctgcctgtatttatatagagatctaaatattttagaatgtagaattttattttaattaaragattaaaatctgcctctcagagaagagaaaataaaccttccctatcaaccctttaatttggttctgtagaccttcagctcatatgaggtttaaaggatcycttgaagaggrcttttaaagtcagtaggtgtgtgtgttccaaaytgaatactaaaacttaagatcactctatgccagaggaaatgaataccttagagggtaaagaggaattttatggcttgcttttaaaaggagagggtacactgggccactactaagcggccaaagcctttgtccaaattttacgaaggctccccttcttctggcacgcactgtgtcagggtctgtggcatggtgaacagcattcagactagatttcagccctaactcatcccygtgaccaagtgttctttgagcaacctgcctaacataataaattgacccaaatgaagatggatatcaggatatgaataagaatttcatttctctgtgttatttagatctccttcaaattcatctaattcatgctctgttttctttcctatgcctccggcataattgtaaagatattattccatcagccttatgggaaaaaaataactagatgctaacataggttcagagatggttgggtacaaagattggactaaacagtttagtccaacctctatattttccagatgaggaaactgtcactcagaccccaaacaggcattaaattcatattataaggttagcacttctgaggatatgcaatccagatgtggctgacccctgttctcagaagatttagggaccactggacctagagagtttcttttgtggatatagtcaacagccacctgtaatgtaaaaaargagaaataagaaaataaaaggtctagaaatttattatggatagaatatttcaaatatgtatgaattttaatcagcttctgccttatttattttggatccagcctgatttttttccatagctatatatagatttgtatttattgaatgctgggtattcagagactctgcatgggaaacctgaaggtcagatagtagccccgttttcctttctatctgaccagttacttggtaagttcttactattctcaccatcagtgaaatagtacagggcctatggtacctgtagaccctaagctacactggacatgaggaaagcagctgtgaaatataaaacagagcctytaccagatttctaccattataattgctggagttctgtggttattctttccctccttatagggcctgttggtgaatcacaagatgtcctaggcaaccatttccacactttcacaatacaacactttccttattgttttcccatagaaatctcctcacttacaagaacttccttactcttctcacctttgtcactgtcccaattgctttgagtgatgttatgttggatatgcatctcctttcccactcttgtccacactggagctccatgttgacgctagacttctaagaactgggcagtgtctggcagaggcaagatgagaagccttcartttattttacaaagacttttttttttggaccaagatttttccaccttgggctgtgacttcacagaggggagtctcatgttacagcactgagatccccactctgccctttgacaggcgccrtgtgggacccatggtcagctgaggcctctttcctcaggcagggactttacttcactttctatcttccacagcagctctgttcctgtgctggccaggttccctgccctgattttcatactggagccttttcctctgggattcttgtgactcataaagtcagcctctaattcaggcacttttcccagcagagaaacaaaaaagacaaacatggacgtttctgttgttgttaagtagcattaacattcaggttcaggagcaacaaaccttttcttagaagacgatataccttttaaaaccctgaagttaaagaattaccacaggaagaatggggatggcaactgtaggaaatcaggataggtgtgagkgaatgccttggccactgaggcctcaggcagctactggtatccaataggtcgagagcacctatgaacctccgatcaaagaccttctgctgtaaatcatagctccacaatgctagttgtctctcctgagttctcacctatacgtatactgttggtttcttctttccattctctgtaaaaggccccctaatgtatctcatgttcttgctttagcccacagtgagacctctttcatggaatgccatggagccctctctctttccctaggtcaacaagtagaaattcacatgtgttcaagatccaagctctttgtaatgggacatctgccttctcacattattactgttttcagaccctacctttctgcttggtaggttcaaaatcagctactaaggggacttgcaaacaatccttcattcttcttcatgcactttcatcccataatgcctaagggaataatgaacttcaagaacagccagaatcgaattgtagattttcctctagtaataactgtgtaactctagtaataactatgaaaacagaatatatttctgtcatctgtttaaaggtaggaaccatgctgtatgttatcatgtgacacatgagcacgtagtagacattcattggaatgacaagtggtgggtatttacctacgactgtgatttatagtcttatagytcaaaggaagagttcacatttaatggaagctcttcttcaggctcaaggatatgtgcggaagaactggcagacagagggaagtccttccagcagggtcagatttcatccttgttctcttgggggatggtgaygcacatagtttcccctgggattttttgatttcagagttaggacacagaaactgattttcatcaacccatctattatgtactataacagtgtctgctttttgttaaagtctttttcatctatactaaacatgtgtcaatatcagatgctctggagaartttcaccatatgtggatgcctctaacataggttaggtcattgtaatgagcatgactagactttgaaaagtagaatcaaggtacatagcaagcaaaattctcagccactctgattgactctgtaaaaggtaataaaacaaaaactattcagcaaacttagaagattgaaaagaaacaaattaagacctgcaaaaggactttattttcaacaccagtaactctgaaagtttgtttagcatgctaagcaaatgtcagtggttggcaaggtgagggtaattgtcattgcctttctctgaagttccttctaccaatgataagtaaaaagaaatggaaagaaaaacacattgcaaataagcctaaagctaatagtgcatcctcaggacccttagtattattaaatcatataatgcttgacctgaatcagaaaactttccacccaaacacttaaaaaattgagaaaataactccagcaaaatcaagagactcacccaagatcacacagtcacaccagtagtctgtgacggatatagcagttgggtcagagacttcaggtggtagtgctttttctcattcaccagcctgtaatttcagctaaacacaatctaccataatgtttcatgttaagaaacatggcctatcatagagcaagaccggaaggaaggaaataaaacttacctcaggttaacagtgtttacctcagggaagtatrattgggatggggaaagaaattatccttcactttatacaattttaaattgttttgtctgtaagcatgtttaagttttgttattaaaaactaaatttaggctgggtgcagtggctcaggcctgtaataccagcactttgggaggccgaggtggacagatcacttgaggccaggagtctgagaccagcctggccaacatggtgaaaccccatctctactaaaaatacaaaaattagccaggcatactgtcatgatcctggaatcccagctactcaagaggttgagacaggagagtcacttgaacctgagaggcagaggctgcagtgagccaagatcacaccacagcactccagcctgggcaacagagcaagacttttgtctcaaaaaacaaaaaacaaaaaaaaaaccctaaatttaaaaatctcccattaggctcagaatttcagtcataagtatgcacccaagagaaatgaaaacatacatccttacmaagcttgtatacaaatgttcatagcagcattgttcataatatagccaaaatatggaaacaacccaaatgcccatcagctgatgaatggataaatagtatgtggtatgtctttataattcaatggaatattatttaaccagaaaaaagaatgaagtactgatacgtgttacgcatgggtaaaccatgaaaagattatgccaagtaaaagaagacaatcgcaaagagccacaccttgcatgattccatttctgtgaaatgtcaacaataggcaaataaatctgtagagtcakaaaatagattagtgatttcctggggctagagggagaggctatgggaattaggagatgctgatcatgggtatgggatttctttgggagattatgaaaatgttttaaaagttgaccrtcatgatggttgcacaattctgtaaatatactaaaagccactgaacaatgcactttaaatargtgattttactgtaggtaaattatatctcaataaagcttacttaaaattcttacttaaaagttaaataatttatatagccacagtgacattaatactatgtccttataatgtcaaatattcagataaaaataataaaaaataattttaaaaagttttaatttgtctatgaaaggttattcaaataaattattcagaagaaggttttcagatttttacatttttaacatggctatagttctcatttactaactactttttgtttggtgttttgcaaaaataatcamtaatcctaataataaatctatacagtaggtatttttatttctatttcactgataaagatgatagctaccagagctgagatttcaacctagttttgtttgcttttgctacactacaatcatcattccattacataaaactaatccttaatactctccttcccagccagaagagttgtctacactatctcttctttcttataacccatttactcctcagagaactggagcttaagttctgcccccagccctccactgaattcatttgcactaaggttgccaagattctttgtttctaaatccagtggaaacttttcagtccctatctaatcttattttcctgtacacttgcctctgttgcctgctccttcctaaaactttttttaaacttccagaatcctgtttccaggctcactgttgtgcttgcatctcagactttttcttctctgtctcattaggcatctccttttctcctcatcctttatgtgtctgtttcacccagtgattccttccttctcttcctactctgcacacccacctgagtggaacacatccacacccacagatctgattttaaactatgtgcctatgtctctcgtctctatatctacaattagatcttggctccagacatacatacctaccggatatcgatcctcaaatgctctgaagcacatcaaaaagtatgttcattacacttaccattcagattgttgtctcctgttaaatccactgtctaatgaccatcaacagtgtggggtagcatttaagggcatgtgcttgagttcggatcctggctctactcactagccgtgtagcctctttatgccttagtttccttatccataaaatgagaattttttaaaaagtatccatctcataggataataatgagggttaatgagtttatacatgaaaagcatttggcccatggtaagctaagtacttctgtggaaaagagatcagagatcaagttaaggcaaatcagtaggaggaatctagaaaaacatcttggtgttataacttgatctctgtgtcttggtccatttgcgttgctataaaggaacacctgtagctggataatttataagaaaagaggtttatttggctttcagtcctgcaggctgtatgagaatcatgatgtcagcatctgcttctagcagaggggagccaggatcacatggtgagaggaagagagcaagagagaagggagatgccagattgttttttacagccagatcttgcaggaactaacagtgaaaactcactcagtctcccaaaaatgaccccaagccatcatgagagatctgcccccacaaccaaaacacctctcccaggccccacctccaacactggggatgaaatttcaacatgagtctcagaaaggacaaatatccaaactatatcaccaagcatcatatccatatatctttaatatctcttgaatratttttctgcagtctttccatattatctccagtctacatccaactagaatcactgctcatctgaagtatttacccactggttttcaccacagtctgtctatatgcacctgcaattcattatccacactgtagcccatgtggagcattctgcattgcaaatctggttgtcattgacctgattaatcttccaatctccacatcacctgtccttcagtcatatcagttctttcagttcacagaaaaaacaaaagtctccctttctttgaggtccttgcttatgcttccattttgaaactcctcctccctctcttaatgggcacatgtaccattcacctggccacctcattaccagctcccacaaacaggtctgttcacatgagtaactgttaataagcccaagaaatgtgtttttggtggtgccaccagaaacccctccctgaagttctcagcatgggtgaggggacctcctccatccttccaaagttatagaaattagcctacattattattattattaattacttgatttccatgtttgccttatcaactagactgtgagcttcttgagttcaaggactctgttttaattatttcctctatccctagtgccagcaatgtgcctggaaagtattgagttgttggttttttaagcaataaaaaaaatatatttaaatcattattcatttatttactcccataagagccctgtatttggtgatcctgtgaaatgctctgtgcywtcaactgagaatacaaagataaattagacttagctctttcctgaagagactcccaatctaasagagaccatagcagacaggaaaacaattagcattccatacaaagctgctataatcgagggcatattctgacagggtatcaagaatggaatatgttaatttattaacatgattaaaatgagagagaagttaagggatgtttacacacacacaaacacacagattgacactgagaagtctgtgggatattaactaatggggtcaggtgactgcattcaatttgaattaaaatagagatagaaacctttcttggacataattatagccctcactgccttattcttcccactatttaaattggctccttaagctcttccccaacctttgacaaagccgcgggcatactataaaatattctatctgtgtaattccagcactcatggatgttctctcagtgttttcccaaattcgagtccatagagttgagctgattcatggccaaatttctgctggcctggggcaaaaagaaagaaaagaagaactttgcaatgtacacatacaaatatcagtatcgggttgcccattgtccttccttgggaggaatccttcctgagattggaatctccctttaattttggtgttaaaaatattttattttatgaaattatggtgatgatagatagtagatattatgttaacgcgcttcatttaaaaaactaaaacgtggatttgtcttcaggatttttcattaaaatcgttcctgccactgtgtgttcttgatgcagtcccccagtcaccctcttgaaatcarctagcactcttttcacggkgccattttttgtacactcatgcacaacatttggtagacactgtgtttgaacatctgattagttttggctgtggacactattttcaaaagcccttggatctaggttttgcagcctgtagtccagacacattggggacccaaacaagacatcttaaagataacaacccagtcataagttggatgattactatatatacaagtcgtcatcaataatgttactttttggtttttgtgatgtccctgacatcacatatgtctccatttgacatatgtctccatttgacaaaaawtttatataattttgatgacatttttatttttttctttgttttctttttttctatatagctgcattatatgacagcccttgtatgctgatagcccctcagcaagtgagagtatataagtgcaaaatatgattgccatttttgctcttgtgttttatttgttgctgtttcaataattcttttttttccattgctctaaactgcttatattataacctttggggtaggaattaacaagttatctgtacagctttcaaaacaccaaaataaggaaacacattttgtaattgcactgtcaaaaaaaagaaaacaaaaaaaaaccttttgcttttcttttagtaacaggcataaagaatgtcattttatttcctaaggtttttttcctctaaattaatccctcactattttcgctgattcattatacaacgctagccttattagagaacactttttgtagctctgatcctgctaaatagaaaaataaagtgatttaataactccatattattaaatgttatgaggctaacattgaaatggagttgagaattacagaggcaacagaagctagcagtaacacatgagatggacaattttgctgtaaaaccagcattcttaaatgtcagtcattaacactgtgtatacagaggagctgatctgaactgcaaaggaaaaatcccacacattaaaaaataatgaaagaaaaaaaaaccttagttcatagaaacactcaatctaagacaagttacatgaggagtagaaaattataagtttagcctgttagttttgctaatatgaaactgtaccctgaaggaaaaaataactacggtaaaagcaatatagaatgataattatattttgttatacccaaacctacacctttgccttagattgtcattatttgacttctcaattcaggcagttctgtctattgtcagcttcattcccctgttccttcctctctctgcctctgcccttgctattcctctacactgagctactttcccatctttctttggttttcataactgtatcagtataagaaaatctagctcaagtatttattatttacatcactttttttcttgagcacttctacctttgtgagtgcctatcttctttggagtcatatcatgttttgcctactttaggccaaactattattgctcaattaaagattactttgtgtaatcggcaaatcattcatttctgtggtcttgtctcattaactatattaatgtaaacctcttgaatatagaggcccttgatatcaatttgttggtatccccataaaagtagaatagtgccatacacatagtgggttctcaaatgttcagtgtgtcatctttaataatcatcacgacaatgatagctgtcggggcatgaagagcaactgaaatgtcttctcaaagtacctgtatgaaaaccacatttttctctaagttaaaatagctgtactttttccttgaataatcttttaagtttttaaagtattaataattgtacatattcttggagtgcagtgatgtttcgatacatgtaatgtgtggtgatcaggttagcatatccatcatctcaaacatttataatatctttgtgttgggaacatttaatattttccttctagctatttgaaactatgtattattgttaaatgcagtcattctaccatgctacaggacattaaattgaaataacaaagaaaacaagttctccacggtgcttccaggaccgttcatttgatgttcatgtttcacaggaccttgacttctttagtagaagaaaagttaaactttaatgaaaacactgactgaccattaatcgaatattttcttagttccaaaagttgtcagctttgaggtcattttatgtcaatttgatgactctaaaactcttctcccttaaaaccacacttcttgtgtcacagcatagtgtatccacacttttgcaatgcacattaacttctcaaatactctattacagagctcagcagctgcagttctcctacaggtttgacaccttttcagtccaacttttcaatgtagtctacactccacttcacttggttgatttactctgctgggtttattactgaactgttcatttaatttaatgactaacaaaagactcagataaaattctccatcctgtttttagagcctagcataattagacacatctcccacatcttcagatagcaaatttaattagaatctccagtggatcactttctagggcaggaacaggacatggagacattgaggctgcttccctggartagaggaagagtcttcccaagctttctttgtattgacctgtatcaaatgtctcagaggaagattggaacagaagataagcctgtgatatattcaaacccttgagcaatactgtctccagggatcaaagtccttttccctcaaccagtaatcayttgatgaagcataacaattaatgacccttgggtccagcataagtctctcttttttcagatatttaatttctccccatttcgtttcatcataaatttaaaatttgaaatggacatcagtaattttgaaaagttaaacatttatttattttataacaatccgtagtttctctgccttcttactttttactgccacattatatgaccttayggcttttcccaaacttactctgctttcttgctattcaccagagtggatgtaagtgaggtctttgacagtggcttccattgtcagttgcagtgctaccagtctagcatggaatgatactcagtttactgccacgaattattatactcatttctctgattaattactatttgcaaaaaccttgcagctggatggaatcaaagagcgttagcactgaaaggagtctcagacattatttgtttcagtgctcagtgtataatgtacagatgggaaaacagtcccacaaaagggaaaatggcctgcccaaggttgtgtagcaacttagtaataaatgccctactagaacaagggtcttactgctttcackccaattgtcattccagcacctaaactgaaatctcttgaatagcatatggcataaaaccttgtakttcctttcattccttcaagatgatactcagtgaggcaaggaygcagagtctgcagaggctaaaaagctgcatatgagggtggtcatgatagctcatgcctgtgatcccacactctgggaggctgagacaggaaaattgcttgagctaggagttcaagaatagcctgggcacatagcaagacctcatctctatgaaaaaatgttttaaataggcaggcatgctggcacaggcctatagtcctagctactggggaggccaaggtgggagaatcacttgagcctaggagytcgaggttacagtgagctgtgattgcaccactctgctacaacctcggtgacagtaagaccctgtcccttaaaaaaaaaaatgctgcatattgagtcccttcctttggccagtggcctactctaacagtcatgtgcaataatctttaattcaacaaatacttactaagcaaatagtgtttactctgctaggaatggctcagttagacaattgtgggaagataaaaaaggacactatatttgatctctaggacaaatgctaatcgtgggtgtgaggcagatgaaaaatatgctctgtttttgtaggtgtgtatgtgtatgtacatgcgtgcatatgctcgtgtgtgtgcatgcatatatgctcatgtgcgtatggagagagagagagaaaaaaagacagtcataatcaatacagggtgcttcaggaggtgctgagaagagaaagatctcaagtgttcagaggaaggttaacatagtgggaagacaaaggttggtatccgaggctgaaaaaaaaaagaaggtgaaataacttgaataaaggaatagagatgagaaggcatctatgaactcattcacttattcatacatgtagtgaccattcattaaaagcttattctttgccagatggcaataagtatacggatacttagatgaaaaaaatgttttctgatctcaggggatacatactctagaccaaacttctaacactttactgtgcataagaagcaacatttccaatgagctctcaggagatgccaatgttgcargtacttgaattgcactttagaaaccaataaacttgcttataaaatgatgattataatataacatgacagttgccataatggaggcaagctacttgggaagctgaggagggatggtcagttgaacttaggcaagggtgccttgggaacggagagtggaggtgctggtggcagttgtctagatgagcttgaaggtgtgtgcaaagcagcagcagacaaggccaaaaccataaactagaactgtatataaaatggagggccttaaatkccagggcaggaaggaactcaggcttgcttataaacttcttgccacatttcctgagtgtgatttttcttcctttaccagtagtgtcagaaagaattaataattataatattaataataataactgaccattattgagcatgttgatgggccagcactgggataaacctgttacatacatgagctcatttgatctcacaagcatcctatcaagtaagtcattatccttcccatcctattatgctgttattgtcctctttttcagaattaaaaagcaaaaatagtgaagcttagagagggtatctggatatttgaaaataactctcgttcactccagggatgctatcatcctaatttactcagtgtgaaccaaaggaaggtcacatgatcttgtattctcaattctattctctattatttttgtattttctatatacttctgctatcatactaaatagtaatttgtttacctgcccatattcctcactgtgctgttttattcctattttattccccaatgtttgggatatagtaagtgtttggtgattaactatattctaattcttctgsaatgtgatccttctagtttctttcatgccttctttctcaagatgtttctcccacattaaatgttctctcatttcttctttctcaagctgtttctcccatattaagtgttcactgtttaaaacagtcttcacattgacaacttcagtgcgagatcttcaaatgccatctcctacatggatctttttctgattcttcctctgcagaccttggaagaaactggctcttccttcttagcaatttcatagtatttttctggtacctctgttatagtacttttatcttatattaggtatatacggtaatttctgtgcttattttatgttaccgataaacttgaaagtcccttgcagaaggagtaagccctgataatgtggttattaagtggttaactttcggagccatactgacaggggatatttttaggctttttttgttaggttggttggtttttgttttcttcgttggtttccagtacctttgctcattgacccaattaccttggtgaagtttcttaacctcgatgagattcatgtgtaaagtggggaaataatgtttacctcgaaggttatctggagaattaagtggcacatataaagtgctttgcattgcctacacagtaagcacttgatacatggatgatattgttggtatcctttgtgttctacccacatcacactactctctccaaaagtagatgctaataatattttggaatagatggatgaatgaatgagtgatcaactttcttatgaggcttacctcctctaccatattgtaaatagtcctattatacttccgtgctcccctatctcccgaactatgtatgtatgtctttattaattattgaaatcttggccaggtgtggtggctggtgctggtaatcccagcactttgggaggccgaggtgtgtgtgtgtgtgtgtgtgtgtgtgtgtgtgtgtgtgtgtgtgtgtgtgtgtstgtgtgtgwgagagagagagagagagagagagagacatctactatagcaatcttccagttagcaagctggaaactggaatttactcctaacaaaacagaactattcacaaaactatttataacttttattttgtgagcttttatagtgcaaaactatatatgtatatatatatatatatatatakagagagagagagagagagagagagagagacagacagacagacatctgatatagcaatcttccaattagcaagctggaaacttgaatttacttctaacaaaacacagctattcacaaaactatttccaacttttattttgtgagcttttatagtgcaaaacaatataattttactaaaattgcttctttaaaggggaaatttgcatattaaaatttatttggcccaccctatcacacagctgcataacagtatgttgataatgtacaaatggcttacgtcaaaggtgaattagaccattaagatgtaaaaagcaacaacccatcaaaagatgataatgaaagttcattggggcatttagggaatttagtgagtagaagtgcttaacaataaattaggcaaaatgtttcaacttagttgattctcaataagtggtccataaaacatatatgtaagcaagaatgaccatgttaaacatgtctgcttattcactacacttcttatcatctgttttgctaaaagctttggagaacaaagtagacctcatccctttgctgtgggtctctgtaagatggaagacataccatatataagccatcacaggattcctcrgttagtcatacaattaacataaattgtgataagtgctgcaaaggaaaagaccagagttccttgaggaaataagactagagggaaggtcaaaggaaggtttttgtaaggaagytccatttaatggagccccagaggatgggtaagaatcagatcaaaagtgagagaaactgcttaacagttggactaatatgtatcatgacccttatttcttccaaaccactgagcccctgcctcagtttcctcacctactaagtggtgatatcaatcacatctacccaataggatcaatgtgaggattatatgacatgtaatatgcttagtacaatgtttgccactcattaaatattagccattattattgttgttttagggtattattattattactagcaattttatcctaaatgcatgggatgatactgaaagtagattaagctggtttaagcaagggaatgaatgtcaagaacaatgaaggacctcagattttttacttcattttcagtctaataagtaagcctcctacactgtactggatacggacagaagattcttcactcctgaatcagagactttattacttataataatagctgtagccagaataaaagcattttcagcagttccctgagctccagttcccacagtgcaacacaaagaaggccaggtgatgcctgcacatgcaagtggttgtgttataggaaaagaaccccmagtgtagggaacttgaatcttttattaggaacagtaatcctgcctggtctttactatggagaaatgcattattgttattatgatggatggttaaaaaaaaaaagtaaacaaaagaactagttccagagatactgtgtctatctttcaaggctgtatactatacaaatatctttgaaaacatagcccagaacaaagacagtcagtgcttctgctascaacatgtgcagaaatgcaagaggctcataaatgtctcccaagaattatataatcagatctgatgttttataagatcattatttaagctgttaaatttataagtatttgtaaaattttacatcttttacttcattcttttacatcataaactttttttttcaaattgtcacattgtgcttataacactaatttttataattatacagcacagtggtcctcaatttgtccatgattttgcatatcaatcatggtctaaaaatattaaatggaaaatttcagaaataaacaatttatatgttttaaattatgtgccattttgtgaagcatgataaaatctctcactatcctgcccaggaccsgaataatcccttagtccaggtatccatgctgtatacactacccaccctttagtcacataggagccatctcagtgaccagatcaactgttgcagtattgcagtgcttgtgatcaaataacccttattttacttaataatgcccccaaagcacaagagtagtgatgtgggcatattgtaatcattgttatattttattattagttattgttgttaatatcttactgtgtctaatttataaatcaagttttatcatagatatgtatgcataggaaaaaacacagtatttgtrgggtccattaccacctgcagtttcaggcatccaatcttggcacatttccactgaagataagaagggactactgcatatcaataatataatccacaataatttatgtagctattcttgaatgacaggaggtttagtttgcttctaatttctggaaatcaccaatgaacacttattttaagatgtgaattggttgaaaatataaagcaactacactcattgtggaaataacagtacaaatggcctaggaagaattgcttgatgctgccaatttgcctaagcccccagtttccaataagggatggtgttaataaaggaatatttttagcctgattgcaaaggtttacaataaatttcaataaagtgctcaggataaacatacaacaattctacttctaccagaaacattttctgagactgagaatcaattaatactatttataaaaccataagaacttcattctatgaaattctacccagagagaaggtcaggagtaacagaatactctatcagatgaagctctgtacatatctaccttcaaatattcttgatataaaatgggtctgataggttttttcctacttatttcaaaaattaatttttagattagtactcatatttgttacctagtagagagtaatctttatatgtctaattattagggagtttactatatagcattagttagaatactagatcatcaaatttaaagctcatatttactgctaaggaaactcattgaaaagataaatgaattgtccatatttataaaattaaatcaatacctgttattgagcatcttctgtattaaagaggctgtggttgccygataacacatttctcatccagaaatacctacccataaaattgggtaaaatggagatatgatttgttgtatggacggtgctatgatcatagaacaatggcaatggaaaaaaataaatgtgtgtgaattatcctgactgagaacgtaagaaaaatctcaaggaagctgagcatttgagtcaccacatctcaggaacataacaactcatcttgcccactatccatttagaggtttaagactcttcagcatcatttccagttccccataccctgcttttttatcctcaggggcaggaaactgaatctcttcatattgtccaatctgccttcctatattcctggggattaggaagggttcccttgggatgcatttctgtcttcctaatacctattagttttagtgctaccttctgggaccacacagtggaagtccactgcccatttcagatgaggaggttgcacatgtttacaatttgcttagagctttcccttttctagattaaacatttccagtgccttctgttgcttttcatttggcatgatttaaaatcacttatcattctgatcttcagattgaagagtaattgtttctgaatccaaaatagtaccccttgtgcaggctgattggtgagtaagagtgtaaatattccctcccttgttcttgatgctacttttgttaatgtagcagtttttatatccatataacaatcttgattcattcaatcttgattcaaatgaaccctctaaacttttattttccaatgaagrctagtaatctgtggtgggtactacagaatcaagtacagcaagaaataggagataggggagggatattccagaacaaggggagccatatataaatgcctagtggcatgaaagaacatgagatgtttgagaaaggctgagtagcccagagtgaatacattatagaatatgcagagggacataaggctaaatggtggatcatgaaaggctttcgaattacatttgtgaattagtgtttagcacgattactttgataaaattttaaaggatgaattcaagaaaaaaaaataccttgaatagtggaaaagtagttaataatggtgaaagtaataatagtaataatatttagtgattaattgagtacctactatatcttccatartatatactacatacattgtgtttgatgtcacacaaaaaaaaatcatgaagacttatttttctcatgttgtggatgaggaaattaaggcttagttaagtggacttamcaaggtaaccaagctattcagtggtggatcctggatcaaatccaggtcttctgactttgtctttgctacactatgacaacagcagatggaaactgtattagtaccgtcagatggaaactgtattagtcattttcacactggtgaaaaagagacatacccaagactgggcaatttacaaaagaaataggtttattggacttacagttccacmtggctgggaaaacctcacaatcatggcagaaggtgaaaggcacatcttacatagtgccagacaagagaagagagagcttgtacaaggaaacttagtttttaaaaccatcggatctcgtgagacttctccactatcacaagaacagcacaggaaagacccacccccatgattcaattctcttccactgggaccctcccacaacatgtgggaattctgggagatacaaaatgagatttgtctggggacacggagtcaaaccatatcattctgcccctaccccctcccaaatctcatgtcttcacatctcaaaaccaatcatgccttcccaacaacccccaaattcttaactcatttcagtattaactcaaaagtccacagtctaaagtctcatctragacaaggcaagtcccttccgcctatgagcctgtaaaatcaaaagcaagttaattacttcatagatacaatggggctacaggcattgggtaaatacagccattccaaatgagagacattggccaaaacaaaggggctataggctctatgcaagtctgaaatccagtgaggcagtcaaattgtagagctccaaaatgatctcctttgactccatgtctcacatccaggtcatgctgatgcaagaggtgggttcctatggtcttgagaagctctggccctatagctttgcagggtacagcctccttcccagctgtcttcatgggctggcttgagtgtctgccatttttccaggcacacagtgcaagctgtcagtggatctaccattctggggtctagaggacagtggttctcttcctgcagctccactaggtagtgccccaaggtgggagctcctaccccacacttcccttccacactaccctaacagaggttctccatgaggcccccacctctacagcaaacttctgcctgggcatccaggtatttccatatatcctctgaaatctaggtggaggttccaaatcctcaattcttgacctctgtgcactcacaggctcagtacaacatggaagctgccaaggcttggggcttgcaccctcagaagccacagcccaagctctatgttggcctcttttagccatggctagagtggctgggacacaaggcaccaagtccctaggctgcatacaccagasgtaccctgggaccagcccacaaaaccacttttttctctttggcctctggctctgtgatgggaggggctgccatcaagacctctgacatgccctagagacatttcccccattttcttagggattaacattcagctcctcattacttatgcacatttctgcagctggcttgaatttcttctgagaaaatgggattttattttctatcccattatcagctgcaaattttccaaacttttatgctctgcttcccttataaaactgagtatctttaacagcacccaagtcacctgttgaatgctttgctgcttaraaatttcctctgccagataccctaaatcatctctctcaagttcaaagttccacaaatctcttgggcagggggaaaatgcttcctgtttctttgctaaaacataccaagagtcacctttgctccatttcccaacaagtttctcatttccatctgagaccacctcagcctggactttcttgtccatatcactatcagcatttttgtcaaagycattcaaccagtctctagggagttccaaactttccsacatttccctatcttcttctgagccctccraactgttccagcctctgcctattaccaagttccaaagttgcttccacatttttgggtatcttttcagcaatgcactctaatcttaccaatttgctgtattagttcattttcatgctgctgataaagacatacaagagactaagaaatctacaaaagaaagaggcttattggacttacatttccacgtggctggagacctcacaatcatggcagaaggtgaaaggcacgtctcacatggcagcagacaagagaagagagagcttgtgcagggaaactcccatttttgataccatcagatctcatgagacttattcactgtcatgagaaaggcatgggaaagacctgcccccatgattcatttatctcccaccaggtccctcccacaacatatgggaattatgggagccacaaggtgagaattgggtggggacacagagctaatccatatcagagaccaatgtgaaaatgttctaaaagtagaaccaacatcacttcacacctccagaaatgcaggagagggataaatcctacatgactgagctttttggcctgtgagatcaagaagacaggatggtgtttggagacagagatccaagtgcagtactgaaaagtctcttttcaagaagtgagactggtgactctacctaagactacaaagtttcrgagaaaaatctcaggaattaatggatatgcccttgataggctaatttccccagaacagatttagcaacaagagtaagtcatgtattcaaagatgattacctttgacatttatttatccaaagatttaacttgaaaatatcctcattcactgtatgcaaaaagtactccacagacagtataaattcagccatctgacacctggtaatgggagctgtgctgtttaatcctcacctatcagaacagaaataatctctcatatatttatgatacttggtagggttgttaaaataaaatgtggacaatattatccatattatgctatagtcatattttttctgaattatacagggatatgaaaataagtagataagtgcagtttgatgaaatagtaaaattaataggaccttgttattagtctataaatatttgaaagatgttaacatctgagaaagacaagatttatttagctaaaatagaagaggataccttgtgttacaactatgtaggagtaattggagaaggatagaggtagttggagcaattgtatcagataaatgttaagttgattattggaaaaaatactcttgccaatgagatttattttttaaataatatctcatagaaagtaataatagaaaaatgaaaaaagaataaaaaacagtcctttaatgtatttgatcaatactagcatagactaatgaaagtatttaaaagaaaaagtctccattatcaatagccttattagtaaatgaagaaaatgtcgttatgacttttctatcttctgagtctatacaaaaacaaatttataatttacaattttagacacaaagtattaactaaagctccctagcatgagaaaatcagtcattatagttttcttgaggtaatggaaacttatatttacctgaatgtaataaagtcatttttatatttacatatccaatatataggtatacacatacatatgtgtgcatttagatgtatctctgcaaatgtttataaatatatatttatgtttagtttataatttatgattcaaaaattctcacatttacacatagatctctattatttattatagttcctaaaggatacttttatctgcaaattttgagggcagtcagtcaattccccaaagttcccaaggccctttgtataggcaacatttacagtaggtaaaagcacagcctttggactttaacagactaaggggcaatcctatctcttactagtttttgtgactagaggagacaaagtattttacctttccaagcctcagtttcttcatcgcaaaatggggatgatacaaccatcaggaggattaaataagataatgtgtataaagcaattaacaaaacacattcaacatagtaatttctaaataagtagtatgtattctcattattattttagttttcatttctatcagttcccaccatgacaaggcaagctgaatgaggacaggkttkgtttgtttgtcttgtttttcattttattcactcctttatctttgggtcctagagagtacttgtacatagaacattcagtaaatatttgtggaataaatcaatgggtgattgatttaatgaataattcagcctccactttatcaagctgccctgtatagtaacaaatagtattttagtattcaagtaaattttagagggttatttagagagcagagattcaaagaaatttatgtttcaagtaatttaacatttaaaatatcagagtttttatagaatacacaatttgggtcctggtagttttctttcagtatcagtttaggttcaaattagtggttaaaggcattggaaaacaaagtatccccttaagggtagtttgtgttcttccctttgaatcaatgcttttctgttttgtttgtttcctcattgcttctttcttaatatttttatgccacaaagattcaaatccaagagttgtaattcagctatggcccaaataggagtaactaaccaaagccaattaacagtaaaatcacatccacactgttggatgtatccaccacattgaacttagctctgctggctagcagtggctctctgcttctctggtttcaaagctggagaggaaagcgtgactaaacatgaatgttattatcagtattattgaataattcatgttattgaataacatgagtgttattatcaggtgaccagcatctaytaaaagtgatgctttctgctagtatggaatcagatgaaaacttttataaacaacctagaaatttagagcttaaaaaatacaacactgcttaatgacacatgatttttaaaaaatctygtactgtagtttcaagctttatattttgccctagactgatttattatacataatttcacatcatatatttacatacaataaacttcacccatttctagtrtataattcaataatgcttagtaactttacccagtgttacatccatcaccataaatcagtgrtaaaccactttcatgcccccagtaaatccctcatgcccacttacaattaatctcctttcccaccccagccccagacaaccactaaactattttctctataaaattgcattttcttgattaacctctgtatttttaatattcattaattaataaaaaactcagtcgtaagagaatgtagtcagacttgtgcctgtttacggggtcaagctattttcttccttttgttttgtttcacaaaagaaaatatggctggtccatctttcacaaaattaacttaaatatgacatttgactgtaataacagtgagcatctttatgtgggcagattaagattctgtaatttcatgctcagctgcgttgatggctttcagccttgtttaagcagaccagctacggacagcagtaaaccctataatgtcctgccatggctaattgcttaaatcgtctamctctgtaacttttatggctgctatttcaactagataccttcaataagatataagtttawtggagcagagcagaatctatttattgtcgttttcayattttattccaaaattaagwttcaccactgtattctcaagtggcagtaaatggattcttccattatttatattgtcctttttagtgaatttgtggtataatagagggtatatattaatttcccccaccccttgtcaagtgtactgtatacataagagagtccctggtatattcatttgacttcattaaatgcaagtacaaatggttcgtcttgataaaagtgagtatttttgcttgggaactcaatggaaatgatataactagcattacagtgttcagttcaatagatgggaactgtgctagacatggggttgggggtacaatggttaatgtgttatggttgcagccttcagggagttcacagcctagctggggaaaaagacatttttaaaatagtgctttactgctatgtgggaaatgccttgatgaggacatgcctgggtgctgtggaaacaaagctgagagcttgcaaattcttttcctgaatctgagtgtgcatgagataagtcctgaagaatgaatagcagcaggctgggtaaagaacaatagcagggactgtggctcttgaaatcatcttagtgcttcctttggagttttgcctagttgtcaagtatcatgtttaaagggccctgtgtgaagaaaatggctgaggttttcccaaaataaaagatgtttggaaatggctgtagttatgaagtttcgctcacctaatgaatgtttccactactgtgttaaaaaagacagtagtggctggacgcggtggctcacgcctgtaatcccagcactttggaaagccgaggcgggcggatcacctgaggtcaggagttcaagaccagcctgaccaacgtggagaaacccactctctactaaaaatacaaaaattagccagacgtggtgggacatgcctgtaatcccagctactcgggaggctgaggcaggagaatcacttgaaccctggaggcggaggttgcggtgagctgagatcttgccattgcactccagcctggcaacctgggcaacaagagcagaactccatctccaaaaaaaaaaaaaaaaaaaaagacagtagttcttagtaatatgatgtttcctgatacacatgtatgtgcattatttataacttgtcttattcctaaaatgatcctattaaagtatttagaaacttcaaggcccagaagaaaatttttaaaaatgcaaatcaatttcatattgtttttcatggctgagtgataatccattgtgtcatttgcaacaacatggatggaactgtaggtaattatttaaataaaataagccaggcacagaaaggcaagtattgtatgttttcactcataagtgggagctaaaacggtggatctcatgaaggcagagagtagaatgtagttatcagaggctgggaagagaaggggctggggaaaataagttttttaaaggtaaaaaaagtatagttagatggaagaaacaagttctgtattccatagtacagtaaggaaattatagctaccaataatttgttgtacatttaaaaataggtagaagagaagatttgtcatgttctcgacacaaagaaaatataaatggttgaggcgatagatatcccagttaccctgatgtgattattgcacattgtatataggtgttaaaatagcacctgtacccaaaaatatgtacaaccattatgtatcaattttaactttatttaattcagagggaaaactttctcaaaattttagggcaaacaaaatctttaaaaaatttttgtttcctttttkgtttccttggggctctgtaaacttctaggctagggtgaaatctcctctgttctaatagtgttcagtctatttttgcttctctttcttttcttctttcttcctttttgtttttggttaattgatcactatcacttacttatgtatctctctatataaactgtaagattcttagtaacaggaactgggcttgcttcctatttgtaactcttatactacctagcacagtgctgaatttcagtagatacagaaatgtcctataacagaatgtgggtggttacaagaaggcaacaaggagaataatttagcaaatatgaggtagacgactgagtaaagtgaattctggaatacattggttgtttcctggcacatatgtggtgctcagtaaacattggctaaataaggatgaatgaggatatgccttgayaaagtttggaggtgggagaaaggatttggagcaattacaaaccaatggtatatttagtataaaatgtgacatgaagttgagtaacataataatttccagcagggtgtttgactggatgcttcctgttaaatgaagtcaacacattttyctcaggtatttcaaagaaccaaggcagtggggaagtggagtctaagaaagcattacttctgcaagktacacagcatgcagtagtaatatgaaaacaatgatttttgactggaatcatggcattaaagaattctcagtaagtttacctgattccaactcatggaagcaatactctcaattggaaaataagtcaacaaatacaaaattgaaccaataaacagataatttccgtgagtaatcagtgatatggagaaatgtaggaggctatataatacctgggatgggaatggaacacctttagytagaagaccagggaaggcatctcagggatctgaatgaaaaggaggtgtccaggagaaaacctggggtaaagcaatcaatgaatgcagatgcccttagagagaactagcgaraatatctgagaggcaggaagaaggccagcatggctaggttagggagtgatagacagagtggggagcaatgagcaacaaaagacagacagtggccacaggatttsatatccctcaaagggactgtgtattttattctaactgcaatggaaaagtctttgagaggttttctgtgagttgggcaacttatgacctgatgttatgcttgaaaacaatcttggtcagtgagaagtaactgcaggacaggagaaaaatcagttgggacgctgttttaacagtctactaagagagcgtattgtttccattaaggtggtagcactgaagaggtagggtgtatttctgtggtagaagtaaaacaacttgttaatggattgggtatggagtatgatggaaaataaatcattgaaaatgcctagatttttcaactgaactcagtgagcggtacctctatttacagaaaggaagattgtaggccaaactgacatgggaggraatgaactggaatgaccaaataaatgtcctttctcgcaagttagattatatatgcttgaagatcatggtctttattttaggctttattttttcctttgtcataccaggcataattccttgcatataccaggtggtaacaaatgggtattggccagttaggtgattgggaagccgagatatggagaatggatgtctgaatcttctattaacttaacaaactatgataaaacttttggcctctagaggtgagttttttttttttaattctttgcaaatcttaagacatgtgaagggtaagaaaactatcatagatttaaaaattgttacctttatgccctttcaaatcctctcacttgcatcctcacaaagttgtaacttgcatacaatatagttgctaataagtagtcatttttcattaatgggaaattcattaaaagcttcatttggaagattttcattgagatccaaagacaaaacattttagtgtttagatactttccttatattgatattttacatttaatatttgccttatattggtaatctaatggctatgaatactaaatattatcaagctgtttacagccacaaatgtttgcaaaaattgctttgtgtcagaaaattaatcccagaggaaagcgctaacttatttaaatggaaggagtttgttcccagtgactagtttcactttactggatcaaatttaaaatcttagaaagcattgcatttatcatgttgggctcttaatttccaacttactttttcttcttttcaatactagagctctggtaataagtagaagattaggtgaacaaatgactacttggaacatattcaaccgaaaagaataccagagaaagaggcgattcttacctttggagtataaatagtagggcagagggaactgaacaattggccttttattctgttacctattggtacaatgagggtgataactctacagtgaccactgtaaggaattactctgccatgaccattgtaaggaagattcagattgcagatgtcaagtgaaacatctcctctttcattatacagctggggcttttccatgaggctaatacaaacagactaacagatcccatgaagtcaaacatcctacatttatttggatgtctgcatgaaaaatcaataaggaaagtagattgtagaattagaacccagcaaaataataggaggtgttctgcatttcttagccttggaacccacactcggttgccatgggaaatgtggcattcccctgtcagggtaaagggttctatttgctctacagaatggctctgtaaggactggtccctgaaaatgctagaacagaaaggcttggaattcatgccagtcttcttcagaactgctttctctccacatatccttgactgtctctaacccttttccagctgttttataaacctgaggatcatgaaaggcttattctaaactacaaaagtggctatgttttaattttgcttaaaagcgctcatgacctcttctttgcctacagaatatattccaaactccaaagagcagtactccctgtttcatgtttagggctttaaggtctttagcaactgttgactaaagtcttcccactaaaactatctccttgctcccgtttttggctgacatgccttcttattctcttctttaccctcatgcatcctctcaattctctccttcttagtctttttttctgtgttaccttctgctactcatcctataatgtttcctatcactaagtcttcatttcagttttcacttctttccatcacaacctttctaggaatatccatggcttcatatgaacctatacaatattgactccaaaatgtacctttttagaccattactgacttctgagattaaactgtaatatctatttaatgagatatctctaccttgatggcatgcatattccctcaaactaatcagatacaatattggaataattgtatttccctcaaatctattattattcttatattcctttctcagtataaagcaccactgctgaccagtcaccccagctagaagcatggaagttgtcctggattcctcactcacacaccacatgcaattgccatatcctgcagattccattcttagctctagccgtattttccttccttcgacccattggttatttcaggttcaggtcagcatttagagacacctatacccacgtcactctgccttcctgggaagtaatttcaatttactattttccatgcttcatactttgcaactttttttacatacactgctttattttccccatcagagcaaactgtgaaaaggtactattatttacattatatgatgacaggactacagatgaaaatgttcagttttgagattgtcaagaacctcattaagaaaggtgagaaattcttaacccaagtccattggttcccaagcccatgctccttccccatcacagtggtgtctcccatctacactcaataaagtaggagaggacagtaacaactgaaaaggaatggaaggaaaaatcaaaacaaggaaaatgaagtgacttatctagggccactgagttcattatgagcatgggggaaagaccacatttctgacatccagatctctgcccttttttccaaaaaaaaaactctaccttttcaatgttgtcgaagaataaaaatcagagtgtgttattctgaaaaatttctttcctatgtgaaatgaaaagatatccagggcaatttgaattagatgcctaaaatcctagctggcatacgaaaatcttcccatttctaattttccaattggtgctttttgtagtacctctctatttttatataaaatttctttttttattattattattgtactttaagttttagggtacatgtgcacaatgtgcaggttagttacatatgtatacatgtgccatgctggtatgctgcacacattaactcgtcagttagcattaggtatatctccgaaagctatccctcccccctccccccaccccacaacagtccccagagtgtgatgttccccttcctgtgtccatgtgttctcattgttcaattcccatctatgagtgagaatatgcggtatttggttttttgttcttgcgatagtttactgagaatgatgatttccaatttcatccatgtccctacaaaggacatgaactcactgtttttttatggctgcatagtattccatggtgtatatgtgccacattttcttaatccagtctatcattgttggacatttgggttggttccaagtctttgctattgtgaatagtgccgaaataaacatacatgtgcatgtgtctttatagcagcatgatttatagtcctttgggtatatacccagtaatgggatggctgggtcaaatggcatgcttctagttctagatccctgaggaatcaccacactgacttccacaatggttgaactagtttacagtcccaccaacagtgtaaaagtgttcctatttctccacatcctctccagcacctgttgtttcctgactttttgatgattggcattctaactggtgtgagatggtatctcattgtggttttgatttgcatttctctgatggccagtgatggtgagcattttttcatgtgttttttggctgcataaatgtcttcttttgagaagtgtctgttcatgtccttcacccactttttgatgggattgtttgtttttttcttgtaaatttgtttgagttcattgtagattctggatattagccctttgtcagatgagtaggttgcgaaaattttctcccattttgtaggtttcctgttcactctgatggtagtttcttttgctgtgcagaagctctttagtttaattagatcccatttgtcaattttggctgttgttgccattgcttttggtgttttagacatgaagtccttgcccatgcctatgtcctgaatggtaatgcctaggttttcttctagggtttttatggttttaggtctaacatttaagtctttaatccatcttgaattaacttttgtgtaaggtgtaaggaagagatccagtttcagctttctacatatggctagccagttttcccagcaccatgtattaaatacggaatcctttccccattgcttgtttttctcaggtttgtcaaagatcagatagttgtagatatgcggctttatttctgagggctctgttctgttccattgatctatatctctgttttggtaccagtaccatgctgttttggttactgtagccttgtagtatactacaagtttgaagtcaggtagsgtgatgcctccagctttgttcttttggcttaggattgacttggtgatgagggctcttttttggttccatatgaactttaaagtagtttttccaattctgtgaagaaagtcattggtagcttgatggggatggcattgaatctataaattaccttgggcagtatggcaattttcacaatattgattcttcctacccatgagcatggaatgttcttccatttgtttgtatcctcttttatttcattgagcagtggtttgtagttctccttgaagaggtccttcacatcccttgtaagtgggattcctaggtattttattctctttgaagcaattgtgaatgggagttcactcatgatttggctctctgtttgtctgttatttgtgtataagaatgcttgtgatttttgtacattgataatgtatcctgagactttgctgaagttgcttatcagcttaaggagattttgggctgagacgatggggttttctagatatacaatcatgtcgtctgcaaacagggacaatttgacttcctcttttcctaattgaataccctttatttccttctcctgcctaattgccctggccagaacttccaacactgtgttgaayaggagtggtgagagagggcatccctgtcttgtgccagttttcaaagggaatgcttccagtttttgcccattcagtatgatattggctgtgggtttgtcatagatagctcttattattttgagatacgtcctatcaatacctaatttattgagagtttttagcatgaagcgttgttgaattttgtcaaaggccttttctgcatctattgagataatcctgtggtttttgtctttggttccgtttatatgctggattacatttattgatttgcgtatattgaaccagccttgcatcccagggatgaagcccacttgatcatggtggataagctttttgatgtgctgctggattcggtttgccagtattttattgaggatttttgcatcaatgttcatcaaggatattggtctaaaattctcttttttgtttgtgtctctgcctggctttggtatcaggatgatgctggcctcataaaatgagttagggaggattccctctttttctattgattggaatagtttcacaaggaatggtacgagttcctccttatacctctggtagaattcggctgtgaatccgtctggtcctggactctttttggttggtaagctattgattattgccacaatttcagagcctgttattggtctattcagagattcaacttcttcctggtttagtcttgggagggtgtatgtgtcgaggaatttatccatttcttctagattttctagtttatttgcgtagaggtgtttgtagtattctctgatggtagtttgtatttctgtgagatcggtggtgatatcccctttatcattttttattgcgtctgtttgattcttctctcttttcttctttattagtcttgctagtggtctatcaattttgttgatcctttcaaaaamccaactcctggattcattaattttttgaagggttttttgtgtctctatttccttcagttctgctctgatcttagttatttctcgccttatgctagctttcaaatgtgtttgctcttgcttttctagttcttttaattgtgatgttagggtgtcaattttggatctttcctgctttctcttgtgggcatttagtgctataaatttccctctacacactgctttgaatgtgtcccagagattctggtatgttgtgtctttgttgtcgttggtttcaaagaacatctttatttctgccttcatttcgttatgtacccagtagtcattcaggagcaggttgttcagtttccatgtagttgagtggttttgagtgagtttcttaatcctgagttttagtttgattgcgctgtggtctgagagacagtttgttataatttctgatcttttacatttgctgaggagagctttatttccaagtatgtggtcaattttggaataggtgtggtgtggtgctgaaaaaaatgtatattctgttgatttggggtggagagttctgtagatgtctattaggtctgcttggtgcagagctgagttcaattcctgggtatcctttttaactttctgtctcattcatctgtctattgttgacagtggggtgttaaagtctcccattattattgtgtgggagtctaagtctttttgtaggtcactcaggacttgctttatgaatctgggtgctcatgtattgggtgcatgtacattttggatagttagttcttcttgttgaattgatccctttaccattatgtaatggccttctttgtctcttttgatctttgttggtttaaagtctgttttatcagagactaggattgcaacccctgccttttttgtttcccatttgcttggtagatcttcctccatccttttattttgagcctatatgtgtctctgcacrtgagatgggtttcctgaatacagcacactgatgggtcttgactctttatccaatttgccagtctgtgtcttttaattggagcatttagtccacttacagttaaggttaatattgttatgtgtgaatttgatcctgtcattatgatgttagctggttattttggtcgttagttgatgcagtttcttcctagcctcgatgatctttacaatttggcatgatttttcagtggctggtagcagttgttcctttccatgtttagtgcttccttcaggagctcttttagggcaggcctggtggtgacaaaatatctcagcatttgcttgtctgtaaagtattttatttctccttcacttatgaagcttagtttggctggatatgaaattctgggttgaaaattcttttctttaagaaagttgaatattggcccccactctattctggcttgtagagtttctgccaagagatccgctgttagtctgatgggcttccctttgtgggtaacccgacctttctctctggctgcccttaacattttttccttcatttcaactttggtgaatctgacaattatgtgtcttggagttgctcttctcaaggagtatctttgtggcgttctctgtatttcctgaatctgaatgttggcctgccttgctagattggggaagttctcctggataatatcctgtagagtgttttccagcttgattccattctcctcgtcactttcaggtacaccaatcagatgtagatttggtcttttcacatagtcccatatttcttggaggctttgttygtttctttttattctttttttctctaaacttcctttgtcacttcayttcattcatttcatcttccatcactgataccctttcttccagttgatcacattggctcctgaggtttctgcattcttcacgtagttctcgagccttggctttcagctccatcagctcctttaagcacttctctgtattggttattctagttatacattcgtctaaatttttttcaaagtttttaccttctttgtctttggtttgaatttcctcctgtagcttggagtagtttgatgctctgaagccttcttctctcaacttgtcaaagtcattctctgtccagctttgttccgttgctggtgagaaactgcgttcctttggaggaggagaggcgctctgctttttagagtttccagtttttctgttctgttttttccccatctttgtggttttatctacttttggtctttgatgatggtgttgtacagatgggtttttggtgtggatatcctttctgtttgttagttttccttctaacagacaggaccctcagctgcaggtctgttggagtttgctagaggtccactccagaccctgtttgcctgggtaccagcagcggtggctgcagaacagtggatttttgtgaaccgcgaatgctgatgtctgatcgttcctctggaagttttgtctcagaggagtatctggctgtgtgaggtgtcagtctgcccctactggggggtgccttccagttaggctgcttggtagtcaggggtcagggacccacttgaggaggcagtctgcccgtcctcagatctccagctgcatcctgggagaaccactgctctcttcaaagctgtccgacagggacatttaagtctgcaaaggttactgctgtctttttgtttgtctgtgccctgcccccagaggtggatcctacagaggcaagcaggcctccttgagctgtggtgggctctacccagttccagtttcccggctgctttgtttacctaagcaagcctgggcaatggcgggcgcccctccccctagcctcgctgccgccttacagtttaatctcagactgctgtgctagcaatcagtgagactctgtgggcgtaggaccctccgagccakatgcgggatataatctcctggtgcgccgttttttaagcccgtcggaaaagcgcagtattagggtgggagtgacccgattttccaggtgccatctgtcacccctttctttgactaggaaaggaaactccctgaccccttgtgcttcccaagtgaggcaatgcctcgccctgcttcggctcgcgcatggtgccctgcacccactgtcctgyacccactgtctggcactccctagtgagatgaacccggtacttcagttggaaatgcagaaatcacccgtcttctgcgtcactcacgctgggagctgtagaccggagctgttcctattcggccatcttggctccaccagctctataaaatttctaactaaaatttgctttcctttttgaagtagctacatttatggaactatctaatacctgatttaagctataataaattcagtttttcattttctttgtgaagaatggtctgtggggaaagggtttttttttttttgtatacatgttcatacattactaagtgccttattgctttctgagatgcagcttttatactmcaaaagcctagaagaatgatgtatagctagccacccaaaacaaaatgagtaaaggcaggaatatgcccgctgtgttaaaacactatattttgctcctggtgtttcaggctttgaggccagtcataatccatttgagtcagtccactgggcaaaatgctgagatttctcattattgctttaaagcaaagagtttttcatggagattagttcagcatttgaagtgtactctcagagtctctcagctacctaacagtgatgagtgggatttttagatttttcacttagttcacttttaattcttacctaaatttaaagaaatccagcatggaaagtatggatgatggattaaggtataatttatataagaaaaatgaaatagaacttcagaaaaaaaatgggtcccaggtttctggccttacaagtcaattcggtatgccaaatattttaaagcaattaaagaacaatttagacattggaaataacaccatcaaaactgtggccagacgttgaaaattccagaaaaaatcttgaccctcacatataaaaaaaagatgaaggaacacgatatgttaactgttctcaaattaaaagtgtggatgacttatagaaatgcaaagtgtaagattgtactaatgataatttgtttaaagttaaaattgtgggcaattaagaaatcaagcatgctgggacaaacatgcttgattggccagtgtttgggctgccatgttcgtcatttaactgttgtcacagagaagaatatgggtcgcagtggcacaggatggagaaaaccaagggctgagaattgcatctgtcttcgatctcaccttaaccacattctggctgtgcaacttaacctaattctcctttataagaagactccaaattctcccatgctattctttaaagataaggaaagaactaatacctggttgataatcctattagacattcatataagagaacttttcctaccctgcacatccagaaccagttattgacttgttagtctaaagtttggatttaaacatttcatttatttaaaaaactgcctgcatgtcttaattacttcactttaagttttaaaaatatgattgtatagtggcataataaaatgagtgttttattggtatttaaaagaaaaaaatggtatttctcccaataaagcatatccaatttattttttgagtcaccacgtcattgctgactgttgagtgaagccatttaatataaagtaaaagcacattttgagtatctttggctatggaatgaaaaattgggggctctaaatttgatttaatgtttttcttcatacttatatccatctgtttgtcccaacatgcttgatttcttaattgtccacaattttaactttaagcaaattatcattagtacaatcttacactttgcatttctataagtcatccacacttttaatttgagaacagttaacatattgtgttccttcatcttttttttatatgtgagggtcaagattttttctggaattttcaacgtctggccacagttttgatggtgttatttccaatgtctaaattgttctttaattgctttaaaatatttggcataccaaattgacttgtaaggccagaaacctgggacccattttttttctgaagttctatttcatttttcttacgtaaattataacttaatccatcatccatactttccatgctggatttctttaaatgtaggtaagaattaaaagtgaactaagtgaaaaattctttattttataatattttttgatcttatctctctcagacctaatttgacagcaatatttttaactattaatacatacttttttttagattttcaagatcagaaaacttactcttgatagagacaaggcttttttgtacacatttcatttttgcaacatttaattatgtaattataaaaacaaatgcaataagaataaacagatttaagaataattacarttgattctttgttagtatgcaaatcacctgaaaggaatggaaatttatgggacataaacattctgcttgctgtggacattggtctgcctgtcactgacagagtggagaagattggttagtctattaaaaggatgctgcttaagagagctcaacagcgcaacttgtggactaactattacactggagggagatctgtgatgatttgccacaatgcacagtccttatgccttattataatcaatgacttaaataaaaatgtaaaatttgatkatataaagctagatgaaakagtgaaattctataatggccaacacatcttaaatgctcaataaatacttattgaattaaattgataactgaatgttagcttaacaaacttaaaatctagatcaaaatcggtaccattaaatttaacatgtggtmactatattgggtcccaaaatccaatgtgtaagtacatgatagatttgatttttaatcatttgaggtcacaaatatataagaggttcagtggactctaagcttagcaataaaattcagcaaattgtaaaagtccatgttatcttgggctgctatgacaggagtatgggatccaaatggagaaaagtcagcatctcatggcactcttccctgatctgaacacatctggaactatgagttcatttctacattctgcagtttaaatattagattggtgcaaaagtaatcacggtttttatcattttttttaaaaaaatggaaaaaaccactattacttttgcaccawcttaatagatatcagaagaaaaatgtaagcacatacaagcaaagataactaagaaccttgaaactatctcataaagaaagaatcaaaagtgttatgaatgtttatttgtaagggttgaagatgcaaggaatatctcagtcatccagtggctactgtggacagatgggtatcacgccaagagaaggaagaactttttaataattatagatgtccactatagatcatatttcccacatgtgtaacaggttcatcaagctaatcttgtacaaaatcaaattcaattatatttttctatccacacttgcactttcctttacacacatgcacttctgttaatagagccgtggtcctttcagtcaatggtggaattctccattcattcttcctcacctcccccaatcctaacaccagagtctgtctatttttgaaggcttgcttaaaagtcacagaagagagcacaactcttcctataccctgggaaaaacagggccctttatatgtaggataatttcactttcaggaggagaaatgcctacccagccagatcactggaatcaaagtgtcttctccttagctccttcttattaattcctgaatattctacctctaaatgtattaaatacattctcttttcttaatttttactgcattattcaagtttaggcatttattaatattcttcaccctgatggtttactattagtctccctgactatagatttcctccacttcctttcattattcagaatagtttcaggtttacttttctgaatcactgttatctccatcttgacccctttattccccccacttaataaccttggagagcccaccattgccaacaggtgtaagaccagaccttggcagggtattcattgtccctcattgcccatccacagtcagcttcctgaccttacccctggccactctgctctggccaagccaagacactcaagtttccagagcacaccacatatttttgacccttcatgatcttggtcatgctcttcatgagtctcaaaatgtcttgttttccttcaccatcctttaaaatacttatatattcttccaaacatagcttaggtagtttgccaattaaatatgcctggggatttattgaaaaatgctatccatgttatttggacatgggccaaatgatttatttgctttcaycattctctttattaccagatatttattgagtactacaatattgaggaatgaaagagtcatcccaagcacctaacacaatccctggtgtataataagtgcccaattaacatttattgggtataactacaacatataagtaattgtacaagacacttcatgttaagtgtcaatgaaacaactggaggactatccagtttcatgtgggaaggtgatgacrttttaattatgttaaatttgaggtactgattggatatccaagacatactcttctttttaagaatagtgacaatttaatgcatgcgctatattaagagagaaggaaagtagacagaaaaagagaagaaagaaatattaaggtagattaaataaatgatggatacaaatatgcaagagagagatgaagagttaaatatgacaaggataaatgcaagttcattagaagtggaaaaataggcaatattgaatatccataagaagatatgttaatgatgaatgtgactttacaagtcacattaagtaactttattgttatcagttaattaataaagtacacaaaaaactttttgtgctgtccattagaataacatagttttaatattacaacatattggaaaaaccacttatcctgcctctcattgcctcagagaaggagaaaatttaaaagccatttgttaccaccagctaggacctttgtgttccatgtgtaatagaacaatttcaattcagatgctcaaaaatttcttaattaagcacagcaatgggaatacatctttcagcaccattcaartttcattttttaggcaacagtttggagtcttttacttggaaaaaatcagagagttcttggaaaggaaactctattgtgcacttcctcaattttatttaatgacagcatcatttggacaggcaatagggcttatacctctctttgaatcttaaaaaggcttagtaatatttatctccacagttgcccaatttagtacctcagccaagctacctaactagggaattggtgccacaggttttctaccaggcgacaggggacttcttctccagcatccatgttgtagcatgatgctgagcctccctcatgctcattctacccacccactattcattgtcacttaaatcttcatgaatgttcatgacttactaatgaggtggtgtgggtgggacagagaagttcctttattaagtgatcttcataaaaatcatcttcaaaagtcactgacgtggaagttgagcatatgtggtaaaaataatgggtggtatttataccaaagaaaaaaagaatttgtcagtgttactcagtgggagttcagtattttctaacaatgtgtttcaggtgctctatatagaccagtcacagagctttgatttcaactttttataaaacaatatggtttgtctcagaggagcaagcacttttttcccttgaaaatggggatgaaaccyagttcttgatgctattgcagaatttaaaagcaagaagtcatgggggccttacagatagatggaattcaatccatggtattcatcattcaaaaagacattgatgaagggtcttttgtgtgccaaccctgagctgcgaatgtatagatgaagaaacccaatactttgctctgaaagcacacatgactttgtaggagaaatgggcatgtgaataaatcttagtgattcatagccctgggtgctattatggatatgtaggaaaatgagatggcagaacagagcagcatgttttagctgtgatttcctcccttggttctttctacaacagttctcagaattccatctgactggcctctcttcctgaggaggtgaaagagacaggaaaaggttacctgtaatttcttagcgatggtaactctacaccacattgtttatgtagccaataatgtggaaacgatagaacctacttggtccgaagggaaaaatgtttggtgttctttaaaataccagttgtagtcaccatcaggtagctccaaacatccactacaagcatccctcctgcaagtatagcttggacattactattatatttgggaataacaaaaattcatttgtgtccacaggtcttgactctatttatcttagttcactgtatttgtcttagaagagagtgaaaggataattacattttggaaaaggctctgtttgttccaaatctacatgctaggagaaactggctaaccttgcatgtgtaatataaaaggagtcaaattctctgtgcacctcagggtaccatttgcatttactttgtcgctaaaactttaaagaggatattattggaatagagtagaataacaaaataattagttataaggtaatgataagtgaagtgagattactgaattttttttgttttaattttgggctgagctaatgatgagaaagctatcagaaattacagttacttattaatcttggttagtgaccataaytgagctgcctaagaactgttggtactttctagatcagtggaaaataaatggtaaaggaaaggattagacattttgcacaaaagatatacaattagccaataagtatacggaaaaaaatggtcattctcactaataaacaaagaaatgctcattacaaatctgatgcatcattcttcatctattaaattgttagggtgttttaaaagttataatgtcagtgcttttaagactgtggggaaactagtacagatacacatttttagaggcaataaaatgatacaaagcttttgaaaagtaattaataacataaatcaagaaactaataagcatttccattttgggaaacgcatctgaagaaaattgtaaaataagaaaaaagtaattgatatcaacatgttcattgcagcactgtttataatattaaagccgtaaacatcacccaaatatccaactatcaacggtggttaattaattatatcttcataggaagtaacgttatgtaactccaaaataataattatagagaccatattagaaatgcttaaatgttaggaaaagcagaggatatgaagttacatatgtttctgtatatatatacaactatgtgaaatacatatggacacgtagagagtcagtaagatagaatggaaagtacacccacttggtgataaggtaggctttagtttggactctggctccacatttgcaagctgttgatttctgaaaatcattttaaattctatatgttttgttttcttgtgtatgggaatacttatatctaccttagaggactcctataagaactacattagataactcggtaaaatgtgaaagaaggtaataggagtataggtgaatatttttaatttctcatttttatttccagtaattttgtaatattttttaatagaaaatgttttattttatatgcttgtaaatttatgatatttttgtaatagaaaatatattttaatttgatatttatcactaaagttatacacagaaatatacaccttgtggcactgactgtatgactaactgaagtggtctaaatacagtaattattcttatttggtactaaacatctcaaagtacacgctctgctaaatcataatggtttatttatttaacaaatgcttatatagctttaccatgtgagagccattgttctaaatactgtattcatttaattcttataataaccctgtgaggaaagtcctgttactatcccagtcttataagatgagaagctgacatacagagcgatttaagtaatatatacaaggttacattggtatatgtggttgagccaggcagtctggctacatagtccaagtcctgaatactacgatgcttttcaactagtcaattgaaaacatgatcaatgaatatcttggcactgtgagggataccaggaaacacagtctttaacttgaagaggcacagtctttaacttgaatatgattctgtaggtttcagctatggtctcaaaattctgtaccctcaaccttagacaaatattatctacgtgtcacaggaaaacacctcttcccacctgtggtgaccaaggttctgaatgaaagactctgcagcctgtagnttgattctctgtggcaatgtcagcatttgccatgtttgtgctgagaaatcctagactcaggtttcttttatacatatatgtatatatacacttgttcatatattatgtgtatatgtaaatagtgtttcaaccaaaatatttaactaatactataaactaaaattacacattcagtaaagttggctgttgaattattattattgtgcctatctcagatgaaagattctcttgccatctctttctaaagaatattctaagattccaagatgaattcttaaaaatgtgaaaaattgttgtaagaatttaaaatractctagaatcaaacagtctcaatgccatttcaggcacaggaagttaccatgtgactctgagcaactttctaatcctctctgtatctcaatttcttcatctgttgaatgggacatacctcatacatttatgagaaataagagacataaaaatttaaaaacacttagaaaagtgtttcagatctcaataaatgttagatattatcattttatttatattacttatctacaaaatcagtcttttcttgttacaggtaatcaaaatctagaactacattaaatttgaagattgatatgcagctggaagtctcatttttcaagttttgtgttcatcaaatagctcaattattattaactaattttacaataagtgttgcaaatttgaactaataaatacatctatactaactaaatataatttacctgatttacagattaggttctgtgtaaaattttgttagaaaaaattattctgcagcttaaaaaatacattgcatcataaagaaatgtatgtttttatgctctgtgttatctcattccaagggcaaaaaattaccttttccaaatatgtttgttcattttaatgttcacctatcgttaaaagcttacttttgaataatacatattaaaatcaaattataaaaaaattaactcttatctggtagagtactatattttggtggagggttctacctatcaccaaatatttaatctctactgtatttctttcaagactggttattgacaataggaccgattaaaatgttcaaaaacattttaaataaatgatctgtgtttcttggagggttagcattaggagatatatctaatgttaaatgacgagttaatgggtgcagcacaccaacatggcacatgtatacatatgtaactaacctgcacgttgtgcacatgtwccctaaaacttaaagtataataaaaaaawaaaaaaataaaaaataaataaatgatgtgtgtttcttctgtcttttcttgcagtcattcccaacatagcaccgcaactcgtcagccttcaatgactctccaacgggccgtctccctggaagggtaagataataatacagaacctcttaaactgtgcagccttggaatatgaagtcttcctttctctccctgtctctgtctctctttctccttccctccctccctcccttccttctttccttccttcctcccttccttccttctccccttccttccttctttccttccttccttcccttctttctttgtctttctttctttctttttttctgtctttctttctctttcttttgtccttttttctctctttctctttctatctttctttctttccttccctacctccccactcttctttctctgtctctctcacacgcacacactctctctctttttttctttcaatcagcaaatatctaggaaactcaccttatgtgccaagcactgtgctaggtactagatttaataagtcaaacaagatttcttcttgccctccagagggcttcattgtctagtamaaatgatagaaatacaaacacacacttgtgatacagtgtaagcattacactctataggagatatgcataagggattaatggagaatccaggagggatacctaactgtaaatggtcatccaaagggtactagggagcaggtcatgttggttcctgaaaagatgtaactcttgagctgaggactgaagcatacatggatatttgcccaacagcacaagttcataaatattcctccaagggaagaaaaaaaactaacatttactgagtgcttattggtgccaggctctatctatttatctaccaatcacctgttgtattagtccattttcacgatgctgataaagacatacctgagcctgagcaattaacaaaagaaagaggtttagtggagttgcatttccatgtagctagggaggcctcacaatcatggcagatggcaaaaggcacttcttacatggcagcaagaaagagaatgagagccaaggttttataaggtttccccttataaaaccatcagatctcatgagacttattcactgtcatgaaaacagtatgggagaagctgccccatgattcagttatctcccaccaggtccctcccacaacacgtgggaattgtaggagtacagtttaagatgagatttgggtggggacacasagccaaaccacatcacctgtcttacctgattttatttctaaagtagtcctacaagataggtatttttttttctgaacactgattctcagagagtttaagtaattttcccaagtgtacttgtatagaaagtagcatagcttggacttgaaatcaagcttgactccactgtgtggctctgtcctctataatgtggtacgaaaagactttattgaggtggagagcactggttgtacaattcataaaccacattcaggctaagttagacatcgtgcagaatttcctaagtgtgaaaaaaataatgaagaactagaatgactctaaccttaaaaatctttaaatagaatcaataacctgctgtttgggatggtactagaggtccatgtgcatactatgtagctgaggtgttgtttgcagtagaggtaagggtgtggggactaattttaccactgtctctacctcactttattattccttttgaagacctctcttggcagggctcagggtggctatcatttcacattttggccatcagcacaaagtagacttccttcaactatgatgaataatggcatttccttctaaggctatctccaaacttttgttttctttctttttattagcaaaagcttattagcaatttgccctaagaatatttttcaatttccactgttttccacttgagttagaggaactctgtagttgacataatcaccatttcttcttctctgatgaggccaaaaatgtaaaggtgttaccctaacttcaaaacaccagagtgactccttttacaaaaaaatagcaaactgtataaacttcatagtgatctattgtcccaactagcataaagcaatttgccttatatctagtgaataacacaatatattctattccctataagaatggaagaaaacttactctagagtcaaagaatttggtttgagtcctggcctctaccatttgttgttgatcagcgaccttcacctctctaagcatgggtttcctcaacagctaaaagggaaaatagtatmcaactcgccaattkgtttgagatggagtctcgctctgtcacccagattgaagtgaagtggcgtgatctcggctcactgcaacctccaccttctgggttcaggcgattctccggcctcagcctcccgaatagctgggactacagacacacaccaccacgccagctactttttgtatttttagtagagacggggtttcaccatatttgccaggctggtctcaaacgcctgaccttgtgatctgcccgccccagcctcccaaagtgctgggatyacaggtgtgagccactatgcccagcccaaactcaccaatttttaaaaataaaagtatcaggtacatattggaccgtcaataagtactagttaaatatacacttagtctaagtgttctgaaaaaaaacaaaatttatttttataggctagattagtttgaagacttattttgaacacttgcttttaaatatgtttatatgtatttgtttatgtaaaacacttctggatataaaatgaaatatttcaggtagaaataacttagcattactgaaatatttagaaggcgaagtctcagtaatcctctacaaagtccagaacacaaaaatttgtgctatacatgcccagctggttgtcagatgaagagataacgtggcacatagtgggaaagttatttttcatcttacataggccaatgggtctttarcaggtttcccattaaagtgttatactgctcagtgtaggcaatcaactgaaattgcaaatcccattatttgaaaactctccttcctaatgcttttgtgaaaagcaactacataggatattttttaaatgaatgtagtttaaaaggccatatgtttatataattttcacccaagttgctatttacttgacataaaataagtggagatatttcagatttccagttaatttgatccattgagacaacaaaactatctaattgagtcctctaccatagagtcactgctgtttttaaattgatatctgaatcatctataattatgccagacaaaatgaggaagaataatatccctattagcagaataagttctggtttcagtttcaagttgacagacacagcccacaccctaatctcctctttctcctgagaccctattaaaaggaagctaatgggataataatatttgtttaaaaggacagtctcctagtgatcaaggaaatagaagggggcatcaaaggccaaatggtttcattatatttctttgcaacagaaagctgattgaagggtattgatcggtgaaaaacaaagtaatctcagcctttgatcacctatggaaacagggttgtacaactccagggggtaccttttacattgcattctattagaatgacatttcctcggattatgtctcccgagttgccacccacaagaagccctaccacagtgcagtagcactatgtgaaggggcctacarctcagcaaagagcagatctgcstagccaaacccggaaaactcagagacgttagggtagtgacaacagatgggattgaaagcagagtctgagaataggaatgaagagtcccccaattagcatgcacaccgctgaataccaaaaaaaagaagcttcttctcagaaaaaattgaatcactcttctgtagcacctagatgagctagtttgagagttggcccccacagctgagcccttcacagtgtgctagtttggggcacagtttcatgttttctggcttaacctcaaacctttccgttaaaaagcctaatcaacctaagtgcctatcaacgaatgactggatgaataaaatgtggtatatatacacaatggaatactattcagccataaaaagaatgaaatcatgtcattttcagcaacatgtgtggaactggaggccattatcttaagtgaaacaatcagaaacagaaagacgaatgccacatattctcacttataaatgggagctaaataatatatacacatggacattggagactcaatagagtgaaatacttcgaggaggttggacrgtgcraaattacttggtgggtaaaatgtacattattctgttgatggatacactaaaagcacaggcttcaccactgtggaatatggccatgtgacaaaattgcacttgtacctcttaaatgtatacaaattttttaaaagctgaaatggttaaaagcatttgcctctggaaaggaagggaggattctcaggggaggtggcacaaattgaattttaagggatgtgtctgcagcaaggcagaggttaaaaaaatagaaaataaaatcacgtgcaaaaacctagaagcattttgttaacactgctaagagtaagaagtatcttcagctactcagaaagctttctttcatctaggagarggcactttatgttaccttacaaggtcatttagtgacacacttaatggcagaattttctagtacaaattctagtagcattttcacattggtaaaacagctgccctgaaaggggttggccagcctttacaagtagcacttaaaaggaaactaaatgaccaccttcagggaaattcttcaaggaatcctttatggaataaatagtttgtctaactaaccccaccaaaaatgtctcccaaatccagaagtatatgagtatcaaaaagaaaaacaaaaagtagttttacttataaacagatctaagggaacccatcctttcaagttaackggtttgtgatgatactgctattgtactttctcaccagggcaggcctaactccatagrgacagccatgtaccactgtttggcacaaaagacacccttcccatactttaaggccacctaggctcatgaaaccatggctccattggggctggggagactctggtgttctgagcctgagctcaggtatcctttccaaggaacatctggaaacaagacctctaatggaattattctctctcttgttctctcctttactccttttgcctgggtgggaaaagctttttttttaaagctaatgtgcttcagatttcccaggatgatgctgacctaaaagactcgtctttttttcctctaagtactcagatgtttggttccaaaatatatgatcatggcagaatgtgatccgaaaatcaccaggtcatctttgaatcagkacatagaacccagatctaacatttcttactgtgtgattttggcaagatgtctgttatctcatatacgaagtgatcaggttgagttaaataaacaaggtattagatgccytccaaatctaacattttggagacaaaattttggcttatggacttctaggaatattcctagttatggagcgtaaacttttaagggaccgttggactttaggtagctggccctttgggctagttggcttgagtcatctctatccacacattcagagatccatctgtacctcaggatttgtaatcagtrtgaatgctcaacttccttcagcacaccctgaccttcaaaagtagtgctaagtagtgttggggacagggaggagttgacatgctgatwaatatactgaattatggaagtgctctttgaaacttggaagagattttttttttaagctgttagttgctagggtcgctggtcgaaaatctgagccttkgcttatcacagatatttaagtgactctatcaaaacagagaagcaagtkgggtaaagggcaaaggatttttgtctatttttagaatgtattaaaataatattcattttattttatgtgtatgtttatatgtgtatttatgtatatgtatatatacacacacatatgtatatatgtatttatatgtatgtgtcattctctttattttgctttcctgtcagctgaagagtttatttataaagaatatgggaaaagtaaggagatgagcacccatttgatttttagaaatgatcggaagaaatcaaactgctccccccaaaaagatttatgtttgtgacttatagtccaataaagacagacctgtctcctgaataagaaagttctgggtaagaaagctttggttgagagtcccaaccttattaatgctgccaggtcacctgctaaaawcatcttaactgtttggaaggactcaaaaagtttgcaggccttccttccatccctgggtgggggagatagatcttcagagtttaaaaacgaggggattcattaggaatctgtcagagcagcaaattcctctgaccatcgctgtccccccagttcagcatcacgtgcttccttttcatttttccttgtgtccctggaatttccacctctcctcctacttgagctgtcagctccttttccttagcctcatttcaaagggtgaacagatttttttttccatttccttactccgtaagacatccttttctaggccttataatctttttccttacatgtgtagcgcttaaaatataaaaggtgtcatcacagcaatctttaaggagtctcccaaatttatcagtgttgaaaaaatgctgagactatggagagctaggaaatatttaagggctatgaagacatgggttctaattctctcacagggactggatttctgttgccatctgcttttcaaataacaactgtgtaaaaataaataaatacataaacaaaccattgattcttgtttagaacagacagargtttccaaacktggaatttcaaggactaacaaaatagcaaaaatattttgcaagatgacatagaaaatctagattttctagrtaaatacttgtatagacgttatccactatcatcattattgttccataaaagaaagccttccttaaaatgaagaaaaataaacataaatcgaagaatacagagtactstatcattaaagcaggtattgaaaacacacagactctaaagttcaaaaagaatattttttctatatttaagggctaaaaatataacattaaatattgtatattttaatttaatagtaactgatatgtgttgtaagtgttttatgtggctctcattttgctctaataacaatttaggtacctttaacccactttatggattaagacactaaagcttggagaagttaagtagcagaactgagatttgagcccacatttttaagtcactaccctttcctacctccccaaacttgtatgtgttttgttattatgagttggccaacctggaggcctgagtaagacattaaaatacaaagtagagctcaatatgatttctgaggttttggagttttttgttaactagaatcattgtcaaaaatctactttcaaataaaaatgttattaaatggggaacaaacttgtataatgattccactcaccttgaaatgtaccgaattagaaaaaatggaggaataatatctccaaactgtaggcttctggtttgcccagcaggactaggaagamgccgggaagtcacaggtcaggagtctcgttatgagaattattgagctgccctgtttagtggactcacatactgcgggctgctcaatgccagtagtattgaccttgtagggctgccacagaatccrctgggcaattgaagttagrgatgtttattttttaaatactccctattttctggacatagttgagtttcagcatgattacttatcataccgtgtatatcttccttgaaaaccttttaaagttttaataaatgggtttaaaaatggtctcaatgtaattgtgaataaactttctcctcgttgttatataattaaatatatccaaaacagcgtgctgcagaatatccaactagaaaattgcccctcttaatcagtactcacagttattaatgctaataataatatgctcacccatgacattgactgagatgtcactaaagagctagttaatatgctgaattaaccaacgaggagcaaaaaagcacccagtcataagtctgttatgaaaatgaaaaccagaaccattattccatgacaagatttagttgcttaaactatcaaaaagattttatctgtcccaaactttctaactgtagccccagcaccaacctcttcttkacatttgcaccattacctctcttygaatactgtccttttttaacttgattctgtttatgatgatgccaaccaataaattcaattaggaatataatgatgagcaaagcagacattgactctgtcctcagtctgggggagaaaatgagacattaattgaataatcacacaaataaatataaatctgttactgtgtcaagctctgtgaaaaaaaaaggggggactgtgatgctctgagtacctataatagggcatctgactttgtcggggtggtcagggaggtcatggaaggctcttatctgaatgaccaatagaccttgactaggcaaagaaaagstcattatcaatggctgcacaatgattacaaatctgtctgagtgtatgactgagcagagcacagatgagaacaacatgaactcagtagtgctttccatttagaaatttataataaggaggctgactcatggttgactcactgtctcctcctaagaggctgcctgatggggtcttccacttgcttatcagagctctgtggtcttgacatagacatgattttctaaatcccatggctgaccagttctgctgttccttcggttttatgtttatgtgtttgtttgcctatttatctacctgtgtgccagaattatgagatcgttcattgccactgctgcatctttccttctcctctaccggttcctcccttggccccttttattttctgtattttctccctttcccctcccttctctacagaaactttctcctcctcctttctcttagtcttaatttgccattcattttcttttttttctcttttattcttgtcttttttttttcgctgttcaccatgaagataccaggcttatgtttgcatagtgcaatataatttacaaaggcatctcagggacattattccatttgatcctaatagcagctttgtaaggtggttgggtaagagtcatttatcctgtctacagatatgacagaggaccagtgacttccccaaggtcatgtgtctgggaagggaaggattcttgactgcaacctagatggctgtctcctgcactactagaccatcctgccttaacagaaatgtcacatacattccaatcacgtcttttagtctgactgacaaaagtccttttccgtcttgtctttatctttcatgaaaataagtctagacaaaagtcrtggtcagaggggttttctggtggctcatccatcacatgagtagaaacagccttagtcttatctgatgaatatttgcgggacaataaatttgaccttggattgaactgcttataaataatgattttcattctgttggtaccttgcctggctgtgacctggaaggtggcatggctaacaagaaccaaaaacaaagaggattgcctcaggtatcatttgtcagccttcattatattactcatcttgagacatctatctttatatatccaaatgaaatctggtttttttttctgcatatatttcaatccctcagagactcttaaattccatcaggatttctgtttacttccttcttctgaccaattataagagagtttaaagaaagagcacgtctgtatcctatgccacagaccagatgcccctttattgccagggaaacagccagcgatgtttatcctttatttaatctctctgctgactttcagtgctggtaaatgtttattccaccgaagtatgcttttaagatgtcagtcagcaacctttattgaccaatggatcacatttggtaaaggctcctgcttattacatagagaattagactgctcaaagaggattttgcaggggacargcaccatttattcattcagtcattgatttgattgattaacttcttatgcatttgttcaactaagcatttactgaatgtctagtatgtgccaagcaytctggtgagatatttgagaaaatcaagaagaaaaaggcccaagccttgcccctgaagaactcagactaatagggtgacagaatgttgaaaattatagtaattcagtgtgattatatctttgtaattacagaacaaaagaacaagcagctgatttgagggaagctactagcactgttckggtggaatttcagtaatttttatcaggtgattaccaaacctgaagggtaaatgaacaccctctttaaactaaagaagttgcatgcttacatgggctgatatcaagagttgggaatttttttctcctaagcacaggtctgtaagagctacatggaagtatagaacagagccatgttcttcacagcctattcagttttgcaaaggagaattctcctgtggtcaagcattaattatgaacattgatgggaaattgcatttcaatatcaatgttgcctgataataaaatgtgtgagcatcccttctcttacagtgctttcactgcatccctgaagtccttgcttgtcctcaagtctctctccttggtatagcagcctggtataatttaaagaagatggccttttggcatatctgtaacttcatttaaattctggctccgcaattactagtcttatcaccttgagctgttactaaacctttctgagtctctgtttctttaatctaaaagtggagattaatatctgctacataggatttttttgacagtttatttttttaagtctataaatggcctaccatactacttaacaaacagtagatacaagtagggatttgttccctctctgatctctcttcctatatcccatctgccctttttctttctcatgtgctagaacccatttcttcctcctccacgccaggactcaattgacaaagtctccattcattgtccatttaacaaaacatttcctgtgcacctctcacacaccctgaggagatacaatcagtaatgtggaagacagaacacagcacatggtaaagaaacagatagtggagtgagtaagcctcatttagaaagagacatcaagagttcaaacgttttctacaccccccaaaaytgatttcttcagagcagagtttcaggaatagtagtagatgtaaaaagaatatttaggggtagaatgtcaccacaccttacctccttatttacacacaaaagagtaagtctagagcccatgcacattatgtgctagctcaaatatgtgaacacacataggttccttccagatatctggggtctccactgatctctgtttcattcaaaatatttattggacactgttacatacacaatgccagtatctcttcttgattgcctatataacagatcatatctctgccacacaatttaatgcctgtagttttctcctttttccatgttgaaaagtttctctcgactgagtgcaaaagtccttcagggtagctgctaggtcctaccctatcatgtaattactgggcastctcccaagcacagaccatattcaacaagtgatggcttgttaaagttcctgcttctactatgacctaaggaataaggggaattatattccctaagtgaccaattttctccacttctagccaatttcttcactaagggagataagccaactagtcatcactttctctctctctgtagttgtacagagttttaaagtttgtagacagtaatattatgaatgctgctgccaccactctttttttttggagtgggggagtatctatcacctcaaacatttatcctttatttatgttacaaacaatccaattatgcactttaattatttttaagtgtacattaaaatattgtttaccataatcaacctgttctgccatcaaatactagattttattcattctttataaatttataaatatatttttgtacccattaaccatctcaatatttcccccaccactgcccttcacagcctctggtaaccatcattctattatatccataagttcagttgttttactatttttagctcccacaaataagtgggaacatccraagtttgtctttctgtgcctgtcttatttcacttaacataatgacctccagttccattcgtgttgttgccaatgacaggatctcattcttttttatggctggatagtagtgcattgtgtatttgtaccacattttctttatccattctcgtttgttggtagacacttacatttcttccaaatcttggctattgcgaatagtgctgcaatcaccatgggagcacagatatctttgatatactgatttcctttcttttggatatatacctagtagtgggattgctgaatcatgtagtagttccatttttagtttttaaaaatgttttcaatttttaatttctgtgggaacaaaataagtgtatatatttatggggtacatgagatgttttgatacaaggatgcaatgtgaaataagcacatgatggataacggggtgtctgtcccctcaagcatttatcctttgagttacaaacaatgcaattatactctttgagttattttaaaatgtacaattattattgactttactcaccctgttgtgctatgaaacagtaggtcctattcattctttctatttattttagtacccattaaccatcccaccttccccccacctacctcccaccactacctttccagcctcgggtaactatccttctactctcaatctccatgagttcaattgtttcgaattttagattccacgaataagtgagaaaatatgacgtttatctttctgtgcctggcttatttcacttaatataatgatctccagttttatccatgttgttgaaaatgactggattctcattctttttgtggctccattgtgtatacataccacattttctttatcattcatctgttgatgaacactgaggttgcttccaaatcttggctrttataaacagtggtgcaacaaacatagcagtgcagatatctctttgatatgctgatttcttttcttttgggtatatacctagcagtgggagtgctggatcatatgatagctcaatttttagttttttgaggaacatccaaactgttctccatagtgattgtactaatttacattcccaccaacaatgtaaaaggattcccttttctctatatcctcaccagtatttgaaactgcctgtcatttggatatagccattttgactggggtgaaatgatatctcattgtagttttgatttgcacttctctgatgctcagtgatgttaagcaccttttcatatacctgatacygatttcattgttaattcatggcatatattagtgaatttttattagtccattttcacactgctgataaagacatacctgagactgggcagaaaaagaggtttaacgggtgggaaggcctcacaatcatggtggaaggcaaggagtagcaagtcacatcttacatggatggcaccaggcaaagagagagcttgtgcagggaaactctagtttttaaaaccatcagatctcatgagacttattcactatcacaataacagcacaggaaagacccacccacatgattcaattatctcccacagggtccctcccagaatgtgtgggaattcaagatgagatttaggtggggacacagtgaagccatattattccacgcctggccccttccaaatgtcatgtcctaacatttcaaaatcaatcatgcctcccaacagtcccccaaagtcttaactcatttcagcattaactcaaaagtccaaagtcccaagtctcatctgagataaggcaagttgcttccatctataagcctgtaaaatcaaaagcactttagttacttcctagatacagtgggggtactggctttgggtaaatacagccattctcaatgggagaaattggccaaaacaaaggggctacaggcctcatgcaagtctaaaatccagcgtggcagtcaaatcttaaagctccaaaatgggctcctttgactccatgtctcatatccaggtcatgctgatgtaagaggtgggttcccatggtcttgggcagctccactcctgtggctttgcagggtacagcctccctcccagctgctttcatgggctggtattgagtgtctgcggtttcttcaggcgcataatgcaaactgtcagtggatctatcattctggggtctggaggatagcaatctcttctcacagctccactaggtggtgccccagtatggactctgtatgggggcttcaaccccacatttcccttctacactgccctagcagaggttttccrtgaggactgtacccctgcagcaaacttctcctgggcttccaggcatttccatacatcttctaaaatctatgcagaggttcccaaacctcaattcttgacttctgtgccatcacaggctcaacaccacatggaagctgccaagacttgaggcttacaccatctgaagctgtggcccaagctctaccttggccccttttagtcatggttggagtggctgggatgcagggcaagaagtccctagactgcacacggaagagggaccctgggcctggccgacaaaaccattttttccccctaaacctccagtgctgtgaagggaggggctgccataaagakctaggtctctgagatgccctggagacattttccacattttctaggtgactaacattcagctcctcattacttatgcaaatttctgcagctggcttaaatttctcctcagaaaatgagattttcttttctatcccatkgtcaaactgcaaattttccaaacttttatgctctgccttttaaaactgaatgcctttaacagcacccaagtcacctcttgaatgctttgctgcttagaaatttcttctgccagataccctaaatcatctctctcaagtacaaagtttcacaaatctctagggcaggggcaaaatgcctccagtctctttgctaaaacataacaaggagttacctttgctccagttcccaacaagttccccgtttccatctgagaccacctcagcctggatttcattgtccatatcattatcagcattttggtcaaaaccattcaacaagtctctagggagtcccaaactttcccacattttcctgtcttcttctgagccctccaaactggtccagcctctacttgttacccagttccaaagtcacttccacattttcgggtatcttttcagcagtgtcccactccccaaaccaatttactgtattagttcattttcatgcagcttataaagacatacccaagactgggaagaaaaagagttttaatggatttacagttccacatagctagtgaggcctcacaatcatggcagaaggcaaggaggagcaagtcacatcttagatgaattgcagcaggcaaagagacagcctgtgcagggaaattcccattttgatgagatttgagtggggacacggccaaaccatatcagagttgaaatcattacaaagttataggagtgctagatcatcatttttatgcatttgtgtttgtgtattccaatatgtcaatgctagcaaataatttgggcttacaaaaaaactataagccacatcagtacctgtcacccttgacatctaagagaaccatggctatcaaagatcaagccttgtgtttgagagtgcatggggtttttgcagaagaaaatatcattatcattacctggccttgtgtgtcagtaaaacacacatcactatggagagctgctttrtaataatgtccttctttcaatttactcaagggccatagccattgtggggcaaaaaaggatattataatgtccacctccttgtgagaaaatgatctaagggtaagagacaggcagaagattttccaaggccacaacaaattcaagaccagaagtcaggcctcctaattttctgaccaggagctccattttatctggaggataatgagagtgaactagagtcttcattcctctgattttttctttttcaattcctcatgccttttgacttattttgccagaagaagggatcattatggggaaactggaatgatttcagtggagaaataatgggaagaggtatgaaatgcaagaaagcaccttttgcagtgtggttttgaccccctgacrtacccaagaagccatttttcttgtctgacagcaagaattccttccatgtaattttyagcagcaagcagggcttgggaagagtcctgagttggccttacatagatcagaactcgtactcagcaaaacagacacgttgcatatttgggrtgccccagcttcattgtgctagatcgaatgtcttcatctcttaaccaccctcctttgtttttggtccccagtgctgcaatcttccttttatcaaaatcagttcttaggatcaacttgttcgcactgagatttagatgtcttttaggttttcattccataatgattcattgatcatattctttgtgcctactattttaccaggtatttaggacataggagcaaagagaacttgtattcattaaccactttttaatagattttatttttcagagcagctgtaggttcatagtaaaaaaaaaaaaaaagagcagaaaatgtggaaaattctcatgtgtgtcctgccccaacacatgcatagcctcacctgttattaacatcctccaccagagaagtacatttgttagaattgattatgctacattgatacatcattatcatccagggtccatagcttacattagcgttcacttttagtgttgcacattctaagggtttggacaatcgtataatgacatgtatctggaattatggtgtcatacaaaatagtttccctgccctaaaaattatctgaacttggagattctgatgattatgtgtcttggggatgatcttcttgttaagtatcttaccagggttctcagagatgacacaaacaaatgaaaaaacattccatgttcatggataggaagaatcaatatcattaaaacagcaatacttcccaacacaatttatagattcagtgctattcctgttaaactaccatgagattcttcacagaactagaaaaaaactattttaaaatcatatggaaccaaaaaggatccttaataaccaaaacaatcataagcaaaaggaacaaagctggagacatcacactagctgacttcaaactatattacagggctacatgaaccaaaactgcatggcacaaaaacagacacatagaccaatggaacagaatagagaacccagaaataagaccacagatctgcaactatatgattttgacaaacctgacaaaaataagcaatggggaaaagattccctattccataaatggtgctgggagaactggctagccatatacagaagattaaaactgtactcctttcttataccagatacaaaaataaatcaagatggattaaacacttaaatgtaaaacccaaaactataaaatccctggaagacaacctaggcaataccattcagaatataggcacaggcaaagatttcatgatgaaggtgccaaaagcaattacaccaaagcaaaaactggcaaatgatatttaattaaactaaagagcttctgtacagcaaaagaaactatcaacagagtaaactgaccacctacagaattggagaaaatatttccaaattacgcatctgagaaaggtcaaatatcctttaagaaacttaaaggaatgtacagaaaaagacaaacaaccccattaaaaagtgggcaaaggacatgaaaagtttacagaagatgacatagatgtggccagctatcatatgaaaataaaggtcaacatcactgatcattagagaaatgcaaatcaaaaaaccacaatgagataccatctcatgccagtcagaatggctattatcaaaaagtcaaaaaacaayagatgttggcaaggttgtggagaaaaaggactgcttttacactgttggtggaagtgaaaattagtccaaccattgtggaaagcagtgtggcaattcctcagagacctagagtcagaaataccatttgacccagcaatcccattactgggtatataaccaaggaatataaattgttctattataaagaaaattcaagcatatgttcattgcagcactattcacaatagcaaagacatggaatcaacctaaatgcccatcaatgatagactggataaagaaaatgtggtacatacacaccatgaattatatgcagacataaaaaaaaggagattatgtcctttgcaagaatatggatggagctggaagtcattatccttagcaaaataatgcaagaacagaaaaccaaataccacatgttctcattataagtggaagctaaattatgagaacacataaacacatagtggggaacaacacacactggggcctgacagagggtggagggtgggaggagggagaggatcaggaaaaataactaatagatactaggcttaacacctgggcaatgacataacctgtacaacaaaccttcaagtacaacaaacaagtttacctatgtagcaaacctgcatatgtatccctgaaaattttttttttttgagacagagtctctgtcacccaggtggagtgtagtggcacggtcttggctcactgcaacctccacctcccaggttcaagcgattctcctgcctcagcctcctgatgtatccctgaacttaaaagttttttaaaaattgtatcttcttttaccaattcatcccttcctccccctataccccatcaactactgattttattagtgtctccatagttttactttttccagagtatcagatagttggaataatacagtatgtagccttttcagattggcttcttttgcttatatgcatttaagtttcctccatgtacttctgtggctcggtagttcatttctttttggtgatgaataatgttccattttctagatgtaccacagtgtatttatccattcacctactgaaggacatcttgattgcttccaacttttggcaattattaataaagctgctagaactattcacatgcaggtgcaggtttttttgtggacatgtgttttcagcttctttggagaaataccaaggagcacaattgctggatcatatagtaagagtatgtttagttttgtaagaaaccaccaaactatcttccaaagtgactataccatttgcattcccaccagcaatgaataagtgcaggtacacatccttgccagcatttgtttttgtcagtattctggatttcgaccatttcaatgggcgtgtagtggtatctcattattgttataatttgcatttctctgatgatatatgatgtgaggcrtcttttcatgtgcttatttgtcatctgtttatcttctttgatgaggtgtctgaggttctgtggcccatttttagttgagttgtttgtcagttttagattttgtttgtttgttgagttttaggagttctttgtatatttttaataatagttctttatctgacatgtcttttgtaatcattttctctcagtatttagcttgtcatttcattctcttgacgttgtctttcacagagcagactgtttttattttaataaaataaaaactgtccatatgtttacatatgttaaaaacatatgttctattttaataaaataaaaaagtccagcttatcarttctttctttcatgaatcatgcctttggtgttgtatccaaacagtcatctcaaaacccaaggtcatctagattttctcctacagtatctccaaggagtttatagttttgtgttttgcattttggtttrtgatgaattttgagtttatttttgttcagggtataatgtctgtgtctacctatttttttctgttttgcatgtggatgtccagttgttctagcaccatgtttgtctcctctttcaccaataccatactgtcttgattactatagctttatagaaaattttgaagctaggtagtgttatcctccaaatttgttttttctttcaatatttgcttgctatttggggtcttttgcctctccatataaagttcacaaaataacttgctaggattttgattgggattgcactaaatctacaaattaagttggaaagaactaacatgttgacaatattgagtatttctaggtctccatttacatggactatctctccatttatttagttctttgatttcttgcatcagagttttgtagtttttttcatataggtcttgtacatattttgttagctttataactaagtatgtcattttcaggggtgctaatataaatggcattatatttgtaatttcagttttcgctttttcatcattagcatataggaaattaattggcttttttgtactaatcctttattctacaaccttgctctaattgcttattagttccaggagattttggcagttatcttggattttatacaaagagtattatgttatctgtgaacaaagacagttttatttcttccttcctaatatgtatgcttttaatttccttttcttgtctgattgtattaactagaacttgcagtatgatgacgaaaggcggtggtgaaagggaacattcttgccttgtttctgatcttagtgggaaagcttcaagttttttttaccattaggcatgatattagctgtagggattttgtagatattatttaataagttgaggagttcccctattcctagtttactgaaagttttcattttcaatgggtgttattaggtactttttagatatcagacactaactcacaaagtaaataaaatactcaagaatctcagagtcaagtgagaaaagcaagtatgcaaataaatttttattgtacaagattataactttagtgttctggcttataatttctagtttactcttctaataagcctctatgttgtgaacttcttgggagcagaaaccatctgctttatggtaataatcctagccacagtggagccctccaggagtatagtagaccctcaacagatacttgttaaatggataaaaagatagagtrtgataattaggataatcacaatatgaatttggtgcaatagaatcctagaggaactagtgttagggagagctgaggagaccaaatgttgttcaactattcatgaggaatgagggaaagtttcctaggtatataaaagagaggaagccaactgctggcagaaaggactatacatggaaagaccaaggtgagggaaagagtccacttaaagaaaagctaggaattcggagaaaatcaaggggattttatgtgattggaatttagagtatttttgagggtttgtcagaagatgaggctacacatatttgtttagaggaaaaattttgatgattcttctaaaaatcacttcccattcttatcagtgtccaaagttggctttcagattttgctgtgactaaaggaaatagttaatgaataactttaagaatgccatgttcaagaagagtttggctaacctctgctctaagggcaggagtctgggtagaaagggaaagtaggtcagtaagatcaatgaaatttctcarttgagaaagcaaggatgggaagcaatgctcttcctcttttttcctgataaagaaaagaaggaattagaaaactcatcagggctgaactaattgttatgtaaagcctcccctagaattagcaaaaaaacagaacttgtagctggtaaaacatttatacaggacatttatacaggacaacacctgtgatacccccagagaagagaacagttgaatgtttcttttaaaggaaagaatttttagagttcaactacagctaaaggttagtaagatgtttgtatttccttacatattatctttgaaaatgaatttcagtaatagtaattaatgatgcattcatggtagtcctttgtcttttttttccacagtaattcttacatacatatcttaactacatgaaaacttctgaaattctattaatgaggtttatggaaagctttgccatttgaatataaggctttctgcccaggcccctggtaacagctcccaaaactgcactggtatgattatacttttatttcaaatccattttctgaagtgacaggtcatagggattgagtcagcctcagtgactccttttgcccctctaggcaggtgatgttcatgtcagtttgtgcattggctcacgtagcccctaccagaacgtattagcttcctaggtctcagataacaaactactcaaactgagtgtttaaaacaacagaaatgtattgtctctcagttctggaggctagagtccaaaatcaaagtgttagcaggccctggtccctctgaaacctgtaggggactctccttgcctcttcctagcttctggagttttaccagcaacctcgagtgttccttggtttgcagctgcaccactccaacactggcctccatcttcttatggcattctcctggtgtatctctgtcttcacatggctgtcttttttttttttttttttaagagacggagtctcgctctgtcacccaggctggagttcagtggcacgatcttggctgactgcaatctmcgcctcctgggttcaagcaattctctgcctcagcctcctgagtagctgggattacaggtgcccgccaccatgcccggctaatttttgtttttttagcagagatagggttttaccaatttggccaggctggtcttgaactcccgacctcgtgatccacccaccttgacctcccaaagtgctgggattacaggcaagagccaccacgccccgccttttttttttttgaraccgagtttcactcttattgctcaggctggagtgcaatggctccatctccgctcactgcaacctctgcctcccgagttcaagcaattctcctgcctcagcctcccgagtagctgggattacaggtgcctgccaccacacccagctaatttttttgtatttttagtagagaagaggtttcaccatgttggccaagctagtctcgaactcccgacctcaggtgattcacctgccttggactcccaaagtgctgggattayaggcatgagccaccccgcccagccctggctgtctccttataaggagacccgtcagattggataagggactcattctactccactgtgacctcttcttaacatctaacatctgcmacaatcctttcctaacatgtcacattctggggtattgggacagttaggacttcaaaaattctttttttttttttttgagacggagtctcactctgtcacccaggctggagtacagtgccgcggtctcagctcactgcaagctccacctcccaggttcacaccattctcctgcctcagcctcccaagtagctgggactacaggcgcccgccaccacgccaggctaattttttgtatttttcagtagagacggggtttcaccgtgttagccaggatgatctcgatctcctgacctcgtgatctgcccgcctcggcctcccaaagtagtgggattacaggtgtgagccaccgcgcccggcctcaaaatttctttagggttggagacacaaaattcaacacataatgcagagtgtaaacttttcagggacagagagctcttgtatagctttgtatgtgcaaggctcagccagggtcgagcccagtagctgctggccaaaccttggttaaatgaatgaagaaagtatatgcaaatattctgctctgttcttctgagtattaagaattgaatctctgtttgccctgtctaagaacctcttcctgatctggcctctgccttcatgtctccaccacacccctgctagaatggtacattgtagtccagtgaaaatatttgctttccttcaaacaccacatattccctgacttccttaatttatgcttttccttattcattaattattatcccactccccatctctctatatcaaatcagtgctctcctatctattagaaaacttaccccgggctgccgcggtggctcatgactgtaatcccagcactttgggaggcagagaggggtggatcacaaggtcaagaaatcaagaccatcctggctaacacggtgaaaccccatctctactaaaaatacaaaaaattagccgggagtggtggcacatgcctgtaatcccagctacttgggaggctgaggcaggagaatctcttgaacccgggaagcggaggttgcagtgagccgggatcacgccactgcactccagcctgggagacagagtgagactccgtctcaagtaaaaaaacacacacacacacacacacacacacacacacacacacttaccccaaatgttacggatgaatgaatgttattataattagttatttttacttacctccctgtccccctaggatgagagcccattaagtcaggacctaaattgtatttatagttatatttccagcgccaagcacagcaccagaagtgtatttaccttgaaaccctaggcccttcaattacatggacctcttcaagctcttgtaccttgtttgctagacattttgctgggtactggagacacgaaggccgggggaaagggagttcatttacagtaagcacattttagatgtcaggcactagcattctgggtaaataagaaattcgcgttataaatgtaatattttatgctttttttttwwwwaaaaaaaaaaaaggagctccagattgtaaaacttccagaccacataaaacctgcatctgcccttgcaaarcacatgctatgctgagagaagtaattcacaaagcaaataattctggccatgttttcctgtgtaattaaagtgtgatctccttcagcaaaccttccatagacccccatctagaaattatttctttctatcccaggccctcataacaatttttatgtatctcttttattattctacatttcgtttcaaatatctatgtctctatatttatgtcttatttcttcctctagattagaaattctatgaggaccaagtcggtcataataatcttcatctataacacaatacttgacaaatgtttatgctcgataaacatttgaatggctattaagagcttgcaattttttatttrtttattatttattaatttattatatatattatttatttatatttatttatctcccttatttattaatatggtccaggaatttgcatttattatcccatttaatcctcacaaaaaccacaatgtaagtactaccattatacccattttgggatataaaaactgaggttcaacaagatgaagtaaattgaccaaagtcttgtagctaataaatggcaaatctcagttttaaacttagatgtgtgtctgaaaccaaagctgggtaattaactactgcagaggaataagtcattcttcaaaaaattgaatagatatattttttgtgcataaagaattcccagttggtagaggacagatacgtatatctgtatctatttttaagtgatagtgctataatgcccccaaataaaatgctctgggaacactgcccaggagatggctaaatgtgcctgtggaattgttgaaggataaactggttcatctggagatgggcattccaaacagaggaagaacacacaaatggcacaggagagtctgaccatgagggccacacaggaatttatgcataattgataggtatagtgccagaaggaatgtattggaagttgagattgaagaagtccatggagcccaaattaatagttacttcatattgttaggagaatcctagttagggatccctggcagagatgtcatgggcctgaactaaggcaacaatactaagatgacgtgagaggcatttctgaattaaagatgactgcatttgttggatgattggaagtactagatgagcagtagagaagaaaatgcagaagtttctgatttgaaaattgggcagacacaattaacccagataaggaacaaaagggagaaaaaaaattctgggagaaaataatgatttcattctggagcaactgaatagaaatttggagtagagaagactgatctgagctagagatatgaattagtggattatcaatatagcaaaggataagaccacctatttattaatttattcaaaaaatatctgtaccaggcactaatctgtacctaatctgtaccaggcactagactagatgctagaggcccaagggggttgtagttctcatagagattgcattctagtgagagatgggcaacaagcaaacaaacaaacacaattaatttactgtaagataagtgtccttacaagatgccgtgattaaaaaaaaaaaaaaaaaaggtgtgggggactagtttagatggagtggtcacagagcacaatttaaactgagacctagagagacaaaggacccctccaagaaagagctagaggaaaggaaaaagaggagaattaagtttctccatcacaccaaccacacttcaagtgcttactaacacatatgactggtagctacgatattgggcaaacagatacatagaacatttcccaaaatttcaattacggaaatacagagaggaacgtttataatgtcaaaagctgaagagaggccaagttggagaggacctaacaatagagccatttctgttctctccactttcttgaagrtgagtactaaatatttattaaatcatcaagtggaattgtggttttagaaatgggaacgccccacttctgattttcattaagcaagcatgtgaaatgctagarctggaagggatcgtggcgattctggtttgcctttttcacccctcccctagttatacaatatggaaacttgttcagaggctgttttcaaggacactcaggcattaatattggagtcaggactagaaaacaggcctcagcctaaagttttttctacaataatatggatatatccaaatcagagttaagataaaacatgaaatacttgaacccaattatttcactttaattcaagccattttccccatatcacactaattgtagagggtttgaacatttgataattaattggagtttcataataccataatgcttcaactcgaaagacattttaaaaaatctttcataaagtgtactttgccttcaagaagaatatgcagagtttttttctctaatcctatttttgaatattagttttgctaatgccccagcttcataatagtttcagacattatttcaccagtcatgagagcttgagaacaaatgacacaactatgaaaaataactctgtacaatagatatttacttttttacttttatttagtttaacaagattgctaaaattattcctgttataattatcaaaaaacattccttttataattaacttatctttaaaacttcaaaatgcaacagggagcaaaagcaaattgttgttattatggatagtatatataacttaaaaaataagttggcaaccaaaacattatgaaataaaagaaaaagaggggtaatccttttttttttttttttttttgctttggagataatgattagaaggtatggttatgaaaagtgagaacgtatgtggagcaacataaaattggttctttgtttattttcttgagaaatttagacaaaaacaaattgaggtggaacttggttattagattatcatgtttgatatgtggataagaaagtactccaaatatttttaaatcaaactaattgatctatagttgatttatgttgcgagaagaaaattttttaatttgtctgattgattccatttaccaaggttgttatatgtagtctcagatgtgtgcctaattctaagatttactccagagaagagaaggaaaagagttttacaaagaactcagacagatcttagcagttaaatccaagaccttatgttacagcctcaatcaaagcccctcactttgcagcagaagtgtctttagagacctttagaattattaattaacctcattgcaggcaaacttggggggctgtagaaacagaacaatgtaacataaacacttaaggcttacaaatagaagttattgcattcacaaagtctcccctgagtacacaaacattcaatgtcttcacattatccaagtataaagtgtgaattccttaggttggcatccatgttccttcccagtctgcctcagtcttctagttttccttgaagccaatcctgcacattattcaaactgggatactcactattctccaaatacatcttgcatatctccgctctggccctaggctcatgccatgtacggaaataccctctactttcctttccactttcctaatttctacccatctgtcaagatctagttcagattgtacattctatatgacttaatatttgttctttaacacagagatctttcatccacaatactcatttggtacttaacatatgtggctttgcaatgttgatttattactttatgtgtgactatttgcctttcaaaggtcataactttctagagggaaaggaaatgagttagcatttaccaagcacttgctgtgtgattctagtatttttatgttatttcaattcatcttcacaatgccagaaaatagatattactgttcacaatttatagccaaaaaagcaagacctcaagaaactacaccaaggttactcaagtatttattggtaggattatgattcaarcctagatctatgtagctccaatgcccatactctttcccaatatcacagtatcccataccatccccctctagtagggttgttttatcccacacagtaccaaccacagtatgtttagtataaactctgtatcagtgtggttattattttgctgaagtcagcctgctctatattgtatatttaatgcatagatccccccttatgatgacagatttctttctattattttaataacatgtcctcaaatagcagttcaacaaaaccctctatctttgtgtatctgtatgatgcccaataatctgtttgactgattatttggctaactgaccaaattaactatttaaatatgaggcacacattatactgcatccttctgaggagctagctcatttagatataagaaggttgtaatcaaccagcagctttgaagccttctgttgttgtcttccatgtgaccacctttggtatgcccctctcttcacaagtttcctaatacatgtcttctcattctactaaaaagatctttttgatctcctacaagtatctcctctttttaataacattgttcacgtgaacgtagttgcatttaatagagaaatgaaggaaaaaggattcaggaagactagctgtagacttcccatatgacttccamgggtaatagaccctttttgggttgtcgttatactagatctgggccttccatctacagtctctggaactcagtttttgtcagtgtatccaggagtaatcaagcttatatgctgtaataccatgtttttaatatatgatgcaaaatgtaactactcaagataccagaatgtgctataactagcacattgctctcaataggamaaacactaggataaattatatttttaatgagctggaggcttggtgagcctggactctgagagggaaattagccacccaagtgaccctaatgactactgtcattgagctaggatggccagatgagcccatctcatacgttacccctaccaccaggacagcacatttatgttagccacctgcagctggagctggagatcacctcgacctcacagckctggagatctattgcgaagatctttcttctacgactcaggtggactctccctcctttattctcccaatttattcagttttatcaattctgtttgcaagtgtaacttatttgacattcaaacatgccttgattagttccccaggccctttttttttttttttttttttttgatacagactctcactctgttgcctaagctaaagtgcagtgatgcgatcttggcttactgcaacttccgcctcccaggttcaagcaattctcgtgcctcagccacccaagtagctgggattacagacatgcaccaccatgcccagctaatttttttttttttttcaatagagatggagtttcaccatgttagccaggctggtctggaacttctggcctctagtgatccacccgcctcggcctcccaaagtactgagattactacaggcgtgagccaccgcgcctggcccccaggcccttttytttaccctatgagccaaaatcaggatagatatgtatcctggatattgttgaagtgctaatatttttgtactttatccttttgtttggggtgtagcctcacagggtcctaattttgctcaggtgtctctgatctaatcccaccactgggctcacacagtcctattcatgcagccatcaaatctagacactaacacactagctcatcactcttcagtctgctgctattctcagtacttgstttcttctgagtttgcatttctgcttcattttcatcctctgaagatttctcttacttgcaagcttagccaagcatttaaaagtattttataactattttattcagaatttttagctgctttgtaatgaaaggggttttcagaatatctaatatgccaaattactggaaatagcatctcaatatttaattttctttaaaacttctcagttttctagatgcctttagttcattgtcttatcggaatttcaacacttccccatgagacaaacattattccctccattacccaagcaaggaacccgacctgtagaggacaatcctggcttcccacakatcccaagagagccagaactagaactcagtatcatttttcccaaccactcactttttttttccgttcatgaaacaatatttttgtttgtatgtctcttatatgctcagcctgtacccgcttccaaaattacacaaaacaaggrcctaaaagtcctttatctttgtctttcaggaccatacagattgacagcatagatggatgggtaaataaatttatttcagaacagtaaaggcagtgatagtggtgtgatcaatgaaaggacaatgtggtttcaaaaaagtcagttcttctggaggtgagggtagaggggacagcagagaggagattgtacctggcctcagtcttaaaggccaagtaggacctcgttagatagatgagaatagcaggaaaaggcaggcatccttctagccaaagcaaacagcaaacagcctgggcaaagacaaggaggaacaacctgggatgagaagctgtggttggcaactttgtaaggctgaaatatgaaatacaaaggggcacaatgaagttaagtggtggagaggtaggtgaggtcaaataataggaagctttgaatgcctatgtagaagtttagaccttatcctaaaaggtacacagatccttagaaggcttttgagcaagagagaaacatggtaagatatgttctttagaaagatcaatgaaaacatatttatatcttaattcccactacccaatacagcctctcaccatggaggttgtaggatttgactggagtaacttcccaagcccccagacgctcagagttcaaggaatagcccacgaatggccatgagaaagacttcagtgtaagtagtaattttccttctttttttttttttttttggagacagagtcttgctctgtcgcccaggctggagtgcagtggcgygatctcagctcactgcaagctctgcctcccaggttcacgccattctcctgcctcagcctcccgagtacctggggctacaggcacccgccaccatgcccggctaattttttgtatttttagtagagacgggttttcaccgtggtctcgatatcctgacctcgtgatccacccgcctcggcctcccaaagtgctgggactacaagcatgagccaccgtgcccggcctttttttttttttttttttttttgagacaggttcaagcgattctcctgcctcagcctcctgagcagctgggactacaggtgcacgctaccacacccagctaatttttgtatttttagtagagatggggtttcaccatgttggccagaatggtctcaatctcttgacctcatgatccgcccgccttggcctcccagagtgctgggattacaggcgtgagccaccaagcctggcggtaattttcctttttgagtcatgaacactcttaaaccatctgccgtaaagagagaaagcctacagcacctcctttctcctcaaaacatcctgactagtttagaggatcctctgagactccagctgagtaagattatgctgctgatgatctgtcacagcttgcagcaggtcaggctggcatttctccattcgctcagcatccaaaggttttataattttaaagactttttacataatattaagagaaaaataaaaactgcataaatgaatatagcacatttcatctaagtgatgatgrtaaaagaataataccttttaagaagaaggctggccgctccttactcttggctactttagcttattgctcacaagtttctgtcatagcacttgtccacttcctaggcttctataagcgtttgtttacatgtggctcctcctaccccaggctctttaatctttgtattcacagtgcctaacacaacataggtactccatagatgcttgtctattggaagttggatggatgggtaagatacatatttttaagtagctatctaactttgtttttaaaactgctgatattgtgagtgaccaaattatgtcttctatacattccatacttaaaacataatatgaaattagctgacagtgagcacctcttatgtaccaggtattggagacaaaaagcaaatgccaacrtatgtcgttttgtatgggtctctgccctgaagttgctcactctagctagaaagggagtcaaataaaccaatccagtggaataagcattatgatagatacatgaaaagattgctaggtgaagcacccaacccagcctagagtagagagactaaggagagtatcagggaaaatttctagaagattacaatccctgagctaatttcagaatgagaaatgagagatagaattttgttccactgtcaatgtataatgatgtataataatgrttagtaacagagccttcagcaatatgaattctggatgatgaataaaataggaaatcagagtccccaaatcattctagtataaaaagtatttgagttatttataaattgtgtttatttattcaatcatcagatgttgactgaacactgttctatgagtattaggtatacctagaaagtaaaccatgatacctcacctccaggatattatgatctcactgggggccacaatgccctcacacacaaaacagttcttagaaatgtgggctattatattaatcagacccagagtcattagcctcagcagtatgcatgcaaaagcagctaggctcaaaatgtttgagaatggtttatcatgaagatcatgggtcttgagcagctgtaatataaaaggaaaaaaaagacaaacgggaaacagtaagataaaagggtattacagaatgggagaaactgaaaagtgaagaaaaggatgggctaaatgtggaatattaaatgaccatcagtcaagtaccattctgagcaccatggaagcgaaaaacatgaagcagatgtcaaatgcaccatcaaacttctaacaaggcagagtctcacactggcagttcatagctggatgcataacagacatctttagtttgacctgcaccatgcttttaccttttttaaccattgtcatatttgaattctgggaaatttatataaatatctagattcttggcttatctttaaaaattagagaatctgtcaagattgcttgacattcctgcttggagcgattgtccagagttgagcagcagcagcccccttttagatgaaatgtgtcttccagtttgctatatttccttctcatcctgctttgcccatttgtgttttgtgatctatatctctggaatttagattttgacatacctggttaaaatctaggaagagggaaagacattcrtgtaattaattataatatgaaatggagaccttaatcactgtgggagtttatccattcatttaatacctatttcctgagtttctgctacctgccaggcatcttactattactggggaaatgctggtgcctgggttctaggagttcacattttcttgagaagaaggtatgagcaattatgacacactgtaaaacatgctgcaatagatgcatgtgtggaagacacagtgtggacccaaggaacaagttatcatatgtacctggggattcagagaagtgatggttgaactgagttttaaggtggcctgagccaaaacgtagaggtatgaagcaacatgtcaaactcagggaagcacagggwctttgatgtggctggaacatagggtgcctggagacgtttaagcagggtagtaaggtgatctgatttgtattttagggaggagaatgtatttggaagattgaaactaggatcaaggagacttcaagttgggagtttatcctaaaagtcaaaacctgaattagaggggatgaaggggttggagtagataccatgacattcagagagagaagagtgcaaggcagcatggaatgcggtattgaaccatgtggttcaaatgataagagctaagggcagttaaagtgaatctttgagtgtcaatggttttggaaactatattctgtaatatatcgtaatcccttttttaaattaagaatcctcctctggcttatatatacttcaatgtatactactatactttaaatatacttgaattttagcttagtttttaaaaattttcattgtttaagttccctctccatcaaatggatgaaacacttaacttacagcaaagagactagctctgatgcttctggctatgtgaatgtagacaagccgatttacytaagcatcggtaaaataggacttgtaatactttaaagggctttgatcctctaacaggaaaatatatgtgaaatgctttaaaatctacagattgctgtaataggttattaggataagaaatttaaattagaaaaaataaatcatttgaagtgtgcttaggacattttatttgcattccattttacaaatttattttttgtcatttatcttcactattaaagtaagtatcataattaactataatataaaattctgtttttaaaaaaggcatttaaatcttctgagtttcaaaaattccaaataatatattttaaaagatttgttttgatagtttgaaatcaatggggtccaggtaaaataaataaaatctactgtcatgcaaacattatatgttttctgtttttaaagacaggaagcagtatgtcaaagtgcaaaggtcactaacaaaatgcccccagatgggtaacataaatgggtaatgggcaatgatgtttcataatgacctttgaaagctgtattcttcctgcataaagtcacattgcatattaaacatgtaagaataatctttacttccataggaatcttactctctcccatttttattaaaatatgattccctccataaagctttcattttcccatttttgataggagtatgagtacaagaaatactttcctcttaattttataagaagtgcaaatgtggtacaatgacagcttttttttttttgtctgggaacaggagaaagaggtcaggactgtggcaaactagagcatgaatgacccttctaaagaagcccattctctaaaccaagtgttgcctcacagcaaaactgggagctagtgttgatggaatgccagacttttttcatgtgaagccacaaatccatatttcatgcaaattttcctaattttaaacttgggcagctaattcaaacatttgtaaatattatgagtcaaattcagcctttgacttgctggtttgcaatctctggtatataccgtattctagacttttggattgtgagacagaaaatctatgtccttaatcctgcctttgctgcttactaaactcagttaaaagcttagacaagtagtctcatttcactaatctaaacatttgccctaatgatttcttcatcaggttatttattttactcataatttcattataaacatttttcaaacataaggaaaagtttaaaaatgttacaatgaacatccrtgtacttgtcrcctagattccactattaacattttcctatactttctctatcacatacctacccatctatccaatcatcaatctattttgctttctgttcctgttttaaagtagttgcaaaatcagtatacctttcatttttttgaggaataaatcaaatgattcatataaagcatcaagcacaatatctagcacagggacaaatgtcagagtcctaatcactctcttccctccatctatatgtactatatagagcttcagtgttgttggacccactaagaatgtctatacgtgtgtttattctggggaaagggggagatttcgacaataaccttttcatgaaaattctgttggcctctacgtttaaaatgtatccccatttctctctaatccaccctcttatttaaaaagcaaaacaaaacaaataaccttgagtagaaaaacacaaatgtaggaagactttagagttggaaaggaggcaacaaactggctaggaaaggaaggatactgtagtgagttcccaggactttttctttcttttctttttttttttttttttttttttttgcttgctatgtatttggacagagcactggagaacctgcagcctggaaccgccaataagtacagacaaaaacagccccaagtaaaacctgctccctttagataaatgactgggaaaaaccggtagactaatagaaccggaaaacttttgataatactgacctactctagccaaacaccaaagaaaaaactgtcccctcaaccctgcagtgtcagtagtgctatgccgagagctaggtttctggctctaccagcggcagccaggagaggcaactctaagatggccttacacttcttccactaggctgttgttggtagacagaacaagaactgaatttccatccccacctggcagcaaataggcagaacaagggggtacgaggtgatgctagtcgatactccactttctagtggggagctgaactcgtacccttacccagcagcaacaggctgaaatgaggtggcgttagttggcattccattcccctactcctaatattgatgggaaccagcaagaagcttaacttccacccctgcacagtggcaatgaagtaggagaaagaggaaatcagtactagttggaaaaccactctgcctgccaggatagtatcagcagggccctgtgaggagctgaactcctacccccatgcaaaggtaaggagaataaggtggttcaaggcagtgctagtcagcaccccatcttctctccccgattggtgttagtggatccaagcgcggagctgaacttctactcccacctagtggcaatgaggtagaatgaggtgaatgctctgtgtctccctccctgctgttctgtgatcaagggggagctgaactgccatgcccacccagctgcaagaggactctattttacatcaaaggaatcatttacaaatgtaagtcaggtcaattcatttcctcacaggctccccatttctatcagagtaaaagtcaaagcttttaaaatgatctacaaggccctgcaggattaatgcaccgttgtctctctgatagtggtaggcagagttctaagagggacccatgatatctacctcctggtgttactcccacagttaagttcttacataagaaaagggattttgcaagtaattaaggttactaatcagttaagataggaaaattatctgggtgggcctggcctaatcacataaacccctaagaagcaaagagttattcagctagttggagaagaggaagtcagagcttccaaatgtgaagaggattcaatgtgccattagttgcttgaagatagagagagccatggggtgaggaatgtggatggcctataggagctgagagaggccccagttgatggccagcaaggaaatgggtaccttattccttatgatggttaatttcatgtatcagcttgactgagtcattgagtgtccagctatttggttaaacattttcctcagtatgtctgtgagggtgtttctggatgagatgaacatgcaaatcaataggctgggtaaagcagattgttttccccaaggggtgtgatcctcatctaatccactgaaggcctgaatagaataaaaaagcattgagagggtgaatttgctgcttcttcctgactgtcttcaagctgggacatcagcagtcttcatctgccttcaggcttagcctcagcctacaactatttaatatatatcactggctctcctcggtctccaatttgccagccacaaatcctgggccttatcagcctccacaactacataagccaattccttatgatgtatgtgtatatactataggggtgtgtgtgtatgtgtatataccataggggtgtgtgtgtgtgcaatctcatgttggctttctctgaagaaccctgactaatacaatcctacaaccacaagaaactgaattctgccaggaacctaaatacatttggaagcagatttttccacagaaatttgcaataaagctgagcctggctgacaccttgacttcagcataggtaggcaacacagtcaagtccacccagactcctgacctacagaactgaaagagaataatggctgtggttttaacctgctagatttgtggtaacttgttattcagcaatagaaaactaaaacagtgacttcattgtttaccattctcctttcctcattcactcagttcagccacagtggcctcctagttcttctttgacaacaccaggcacccttccatattaggatctctgtttggctgttcctttcctctggccagaatgttcttcctttttatagcgacatgactagtttcctcacctcttcaattttttctaaaatgtcaccttctcaatccatcctacccaggccctcctcaccacaacctatccctcctacactgctctgcytttttttctctccaaaatactttttgccttctaacgtgctatataatgaacttatttattgcatctattgtttattagtggtctaccttcattagattgtaagcccacaaggacagggatatttgttttgtttgcaaacattctgagcacctgaaacaccttcctggcacagtaggtgtttacaaagtatttgtagaatgaaatgagttaactctatgtcactttacctctgacttaatgcattgttacataatttattacttacagttcaagttgtgaggtgcactttacacctttcctcataataaggcatatatacataatgcatcattttatgcatggaaatgtgatagcaagtaacaaattctttgtgtagccattagtataaaatacatgggatggctctttctcattcttacatcattaagagctggaaaatagaagatgaactgagatgtttgggagaggagggtgggtgatgcaaatgacaacttggtcaaacctaaggcttgcaaaaacactttttaaaactactgatacagaaaattgaactaaatgcattttaagactttttacattctataattccatattattctgagctgtacacaaactcagtgaactattggctcaagatttgatctctgacctttttattgatgatcctcaaatatgtatttatagtcctctctgaaggcccatattcctattctttgtctccagctgcttcagaacatctccacctggatatctcactatttcctggaactgagtgtgtcaaaatcatactcattctcatgaccctggattccactcatctctccttttgctagttacttagatgctctctctcctctttttccaatgtctgagtcatctctggacctactgcttctcccttcaaatttcctctctcatgttgccctttttaaaattctcactgctgtcacccttcttcaggctgtgacttcctcacagctggattcctagacaacatcctaaatggttttcccacctccgatcatatctgtgctttcctctccgtcagccctccataggaccatctgttaattttcctaaaatgaatttaagtattcttaatgtctcagaatcttctaatgagccccatggcctacacagtaaattttaattaacagtcaagcaaacaacaaacccacaacctggcttgtaagatctttcatgatctgggcattcaaccttagtctcttcttcccaaaaatccctccctgcttttgtgtgcatccgtcatactgagtactactgtggtgcttgatacaaaaagagatgttttaaacaaaagaaaagtagaagtaaaggtagtttaagaaatttttttagaatgaaggaatgattttttgcatggtattttggtagttgttgcagtggggaactcaaacatctgtcctgatattagcctctttcttgatgtgcaaatgttatcttagtttgagaaacaattttacaagtagtgagttgctgatatcatatatcccattgaaagtaaaagcaacgtaaatcttaaatggatcaccctctgagctgtgttctctatttctttctgcagagagcctcgcaaggtagtcctgcacaaaggctccactggcctgggcttcaacattgtcggtggggaagatggagaaggtatttttgtgtccttcattctggctggtggaccagcagacctaagtggggagctccagagaggagaccagatcctatcggtgagtatgtttctttaatctttattccctccatatctgacgccatcaatgaaaaagtcataactttcaattatgataccaaaagcaccttaattacaaaggaaagtggatgagagcatcacgacttctggtgcatgtcacaattttgtttgtttttgtttttgtttcctttgagacagaatctygctctgtctgttgcccaggctggagtgcagtggcaggatctcagctcactgcaacctctgcctcccgggttgaggtgattctcctgcctcagcctcctgagtagctgagattatagctgcccaccgccacatccgactaatttttgtattttaagtaaagacagggtttcgccatgttgtccagactggtctcaaactcctgacctcaggtgatccacccgcctcagcctcccaaagtgctgggattacaggcatgagccatcaagcatggtctacatgtcacagtttaaatggtgttcaggtscttgatgcttgttgcacttacttccctcaaataaaggcgaaggtgctaatgttttcttctagatgttctgagacacatttgcatccaacagaacgttgagaagcatgcctttttaaaaatgatatattacttattttatttaaaaaaacagacttttctcccaaactcataaccatactctaaacactgtacctttataatgtgtatagtttggtgcaaatgtaaaaacaaaaaaatgcataagataatgctatatagagtttgctgatggtactaagttgtagcagtggcaccattcaactaaattcaagaattatcagcaacaatgtattaagcacctttttttttacctttttaataatttcaacttttattttagatttggcggtacacacgatgtttcttatatgggtatatcacgtgatgctgaggttgagcatacaattgatcccattacccagatagtgagagtagtacccagtagtttttcaatcatttcccttttccttccctccccactctaggagtccccagtgcctatkgttgctatttttatgtccatgagtatccagtatttcgctcccacttataagtaagaacatgtggtattkggctttctgttcctgtgttaatttgcttaggataatagcctccagtggcatctgcattggtgcaaagggcattattttgtaagtaattttcaagggtactttactgagatgagattgacgtagaaaaagttgtacatacttatgacgaatttggagatatgtatgcacacatgaaaccatcaccacaatctatgccataacacaaccatcactccaaaagttttctcctgttctcttctttttttattattattttccttttgttataagaacaattaacataagatctaccatcttagcaaatgtttaagcaagcagtattggtgactataggcacacattgttcaatggacctctgacttatcttgcataactattatttattcttctcacaatcactctgaaaggtactgcctcatgttcaaatgaagataaacttccagcttgtcaaagtttacctaactatagagagtcagagctgggatttaagtattccattttaatgcccattacacctaccatatcccttccctccctcttttcattcttccatctcattgccactttcccccttccttctaatttccctttcctcttcctttcttttcctgtttcctttaacttattcaaatatttattggctgtctccttctactatgtcaagcttcctccttagtatgatagggtaaatccattgtgagtgttcctgcctatattttaattttactaatcatgaaaataataacggagggttacataaggagccagtacttatggctgatattatggttcatagttcataactaaacaaagcacttagtttgtggttttcattgtgcatttagaaaaatttgttttcattttatggctgtgatttataaatagaatcttataattkaccttatatttgttagccaccattccaacccttcaaaaaatgggaaaatctctctctctttctctctctctctctctctctctgacatacacacacacacacacacagtttacctgaataacatcatacagtcagttgactttagtaaggtgtccggaaatttgcatgaatagccttgtcgtatgtgtcactgtggtcctctcacatatgaaggcctctgcctactcatcaggtgcagttctctggaaggatgttgagtatgggagatacagcgtatagtcccacaccaggaccttgttctgccatccaagagctgagcatcattccttaaactacttcccttacctacttcttcaatactttcatgatatgtaagatataactggcagctatcaaaccttattgtgcatatacgtttacatgtctgtctttctgtactaggtggtacggtctctgaaagcaaattctctatcttayatgattttatatcctcaatatttagcacaatgcctggcacatagcagtctcccaaaaaagaagtgtttatcgaatgaaaaagtgttgaataaatatggtggtacattaagaagtcactatagcctgaagattgattctaaaattctacctaaagcatactaacgtatcttcatcatcctggcttacattctgtatacttgcggaccactttgtcatttcattacaatcagcattcatatcgtcattaaatgttcccagacacaaagcactgtcacatgcattaattctagagattctctaaggcattctaagtggcaggataggttattattattactcccattttccagatcagaagaaaagagatttggagaggctaaatgatctgtctatgtctccacagctactgactataaagctgaactcaagtcagtgttctttctcctctcagcacactttcttttcaaaatattgtcaacagtctctatggcacatcttcttggtgcacaccgcactgtgtgcacatcacattcgggaacacataaagcaataaagaactaatacttacatggtacttttgagtcagtcactatcataaataatttagtcttccaacaacactatgccttgttatgttcatattaaggataaagaaattgagctacagagatggcattagactctctaactctgtttaaataaaaaatccaccaagccataggctttatttattttaacctccatacatgtgagaggaaaaaggtgatctagtgatactctatggcttgacaaagaaaactcgcaagtatttctgcttcaaaaatagatttatccatttaaatattattaccaggaccacacagtaaataaggcaaccaatcagaattatagtcgtcttagatattataattcacagaatataacaacaatctttgaagttcacacagcatatccgtttttatgtataacatttgcaaatacakatgatgaggaaaatattatctgcttttttcagttgagaaagaagagggaacatttytccttagtatatcaaaatgtatttcacctgtagctagctagaaaatggctagcttctggaaaccatcattctcagcaaactatcgcaaggacagaaaacgaaacaccgcatgttctcactcataggtggraattgaacaatgagaacacttggacacaggatggcgaacatcacacaccggggcctgtcgtatggtggggcaagtggggagggatagcattaggggatatacctaatgtaaatgacgagttaaagggtgcagcacaccaacatggcacatgtgtacatatgtaacaaacctgcatgttgtgcacatgtaccctagaacttaaagtataataataaaaataaataaataaataaatawgaaaatggctagcttcaaggttcactattggaatttaattgcttaacattgagagaaaagaacagtcttgagaagctcaaacattacaatgtggaaagcaaaatggcacagaagaattactaataatggaatatggaagataaaatattttcatstataacttgcactggacatacaggggcaagcaaccttcctggaaaatgcaaagcaaaaactctaaataacaatcaagagctagctgggcacagtggctcatgcctataatcccagcactttgggaggctgaggcgggcagatcacctgaggtcaggagtttgagaccagccaggccaacatggtgaaaccctgtctttactaaaaatacaaaaattagccaggcatcgtggtgtgcacctgtagtcccagctacttgggaggctgagtcaggagaatcggttgaacccaggaggcagaggctgcagtgagccaagatcacaccactgcaccccagcctgggcaacagagtgagactctgtcaaaaaaaaaaaaaaaaaaagctaaataaaattcaatacatattaataggtcatgtaagattaatttgcaaataagtcatgttaacaataatgtagtagtttcagagaaaggaagtagaatccccagggaagggatctggaggatatgtctttggtctcaattgttcttcataggtaagagacttgcataatagacaataacctttctaatgaggggcagaatgtccattcctactctcacacacagactatagaatattcctaggtaatttagttattaatggcttactatgtgccaggtattgtatatgtatgtatatgtatataaacacatatacatacacatatatatatatacacacacactgaagaaagagaagagacagtaacacttaaaatacagcatgtcatagtatacatattcaataagtgttgctattactatcaactctgctttaagactgtatctgttgttttttaaaaaggttcagatacccatgtataaggagggcctcttttggatagtttgggctgttccttctttgggacagggattggactagattggcatttcccaaagtgtgtttcgtagaacactgaaacagcaggattgtaataggttgctactgtaataggttcatttgtacaggcttcttcaatgaagaacttctaaaaaacatgtttacctgtgtccattggaaatctcctagagcagatgaagtctatggctttcaaaaacattttgaccaccaaacccttacataaggagtaacttacaggacaccagtagtgggaaatgctcgagtagatttgttattattatttgtgacggagtctggctgtgttgcacaggctggagcacagtggcgtgatctcggctcactgcaacctctgccttctgggttcaagtgattctcctgcttcagcctcccaagtagctgagattactggtgcctgccactctgcccagctaatttttataatccccataattgactgattcctacattcttgcctatacagaaaagggaagtaacgttttactatgttttaaggttatgggtgccatctagtgttcatgcattgtcaaaacacattacttagcaacctgaagatggagggtcctgaagctccattatagggatttttttccaggcctaccccttatccccaccagaattccaaaattaaatatttaagatgctcaaagacaaagaaattgtcaccttgggctacatcctatacatgtattataagtgatcttttctagtttctcttttatgtattctatttctcagggatttgttgcagaacggaattcagtaattgaaccatattcttgatgtattcatggaggagaatttagggcwttcagcatgcagtcacattaactagtgcagtcgcctcctcaggcattctttctgcagaaggaaagctagaaatgcttctcttattatttgtttcagtgatttgttaggaaaaaatgtgaaacagagcacagagaagcaatacccctagaaagagattatttcctgtctctccaagcaattttagtttattcattcctcaggcatccaaaaatgatcaccccagctgacttgctaactccaaagctcattcttgatatggactttaagtatttaacaaagtgtgtttcaagatacgtgattgggaatatgtattgccagaagtgaaatgctgcagctgtcgaagtgaaggtataataggtaactggatttccaaattagaatttaaattgcattgttgatttaaaaagagtaaaaatgagtcacagctgacatgggtatttcaaaaattttcaggttatcttyatgtttagaaacgtgcagaggggaaggacttgatttgccaggactctattttcaagttaattaaacagaatatgagcactatacagactattctccatcttggggtactgataaggtcaccttatattgttacctcaaataacatttctaaatctctkctggtgttgttgcttccmcctctccactgccatccccagtaaagatgtccaaaattatttcttcgatttcctgaagtggtcctcatatgagccgccagacctcatcccttccagtcaccatgccatacctgccgtgccgttcctctctggctctggttcccggtcccatgraggaaccttgctttcctagttttcagtactgatgttctctgcctaagaaactctctctccctctgtgtgttcctgaaacaagcacgctctgaaatrctaaagaggatctggggcctatgcaktgttagggacaagtctcatctccacatctcagtgctattatttcaccttgtccccaaaagtgaaacagcttaaatcagaaatcttatgaaacctttcacctaagccacaccttcagcttctcttctctcatcttcaaaacttggagtcacccaaactccagcaaaaccactactctcccttcaggaaaaagtatcagtaaggtttcagaaatttcaaggtactgtatcagccaggacatactcttaaactttgaagtgaaatccaactaagtggagttgatgctgtttttgaggaggtaaaagcttattgccttaaatctgaccagttaaatttagagttctggtccagaaaccatgtggaagttgcctctccaaaccagcatgcttgttccaggcatttgctctctctctctaacccactgcatctagacacattgactcttcagtcatttctggcttttgcctctcttaattgtagagcccatttagacttctccctaccttactggatctttcttcctgcacagctcagaactcactgctcacctgatcacaagaccacctcaaatgaaaacagatatggcttgtgaagaggctccaggggagtcactcttgctcagccttggcttcagagccccactagccaggctgtacctcctggcccagccaccagagtgtgggtattcagcagggcctgactatgggcagagttctttattcctgatgattgcctagtgcatataaacatcacccatcacatacagacttccagcctttggaaagaggaaactgtacaaaaagcctatctaatcatatccttttcctgctctctttaaagcctttcaatggtgtcctgctgttcttaaagcctaaaattgttaacacagcccacagaattttgcagagtctggcccctgcctgcctggacagcctgccccatccacaatacttcccctactctcactgatgcytcagccactctggatttttctttacctatggtcagggatgctattcaaaattttcacaccttggcataaccctggcacccatccacacaatgaatggccgtagtgccacagatgccagacagcagggcagtggggacttctagggagccagagttgtgggtcactcaggagggctcaggacagcagttatttactaacaaaccacacacaagtgtgtttcactgttgtacaaaaaggaagagccatatcactgagtggggacggagcagcagccctgtcccctctgtgctgagctccctcctacctccatcttgttcactgaatttcctcgaaaaggaacttggagtagacaaggaaaaaccctccattatctaaaagggaccagagaactcatgaattgccccaagcgtcacttaaacagcatccccattgtctgacatagaatccggctgtataatatatgttaaagaaaagcagtaattaggccgggcacagtggctcacacctgtaatctcagcactctgggaggctgagttgggcagttcacctgaggtggggagtttgagatcagcctgaccaacatggagaaaccccatctctactaaaaatacaaaattagccggacgtggtggtgcatgcctataatcccagctactcaggatgctgaggcaggagaatcgcttgaacctgggaggcggaggttgcggtgagccaagatcatgccattgcattccagcctgggcaacaagagtgaaattccatctcaaaaaaaaaaaaaaaaaaaaawatatatatatatatatatatgtgtgtgtgtgtgtgtgtgtatatatatatgtgtatatatatgtctatatatatgtgtatatatatgtgtgtatatatatgtgtatatataaaaaacaaaaacaacaacaacaaaaagaaaaacaataaaatctgtgggcactcagcaaactgtgtagggaaacaaaattaacattgctcctttccagttatattccttaagtcttgcttattcaatgtgtcataaacatactatatgtcacaacttagcaaggtgcagtgaaaatagtacattgggaaccatgtacttaacatcagacttgtaacacctgactcacaatatcactactcaaaggatttaactgtaagcagctttcaaaagtctgaaacttaactcagtgcaccagtaaaacaccagcttttctcgcagtggtacttccaaaactgtgtataatagcggatgtgtgaaatgcttcataaaaaaggttcataattcaatgaaagatctgagaagtcctgcagcaaattttttaaatgctgataaagtgttttttaacattatttaacaaaataacttttttagtctttggatataaattactatcaagtgaaacatattttttgaaaattctgtcataatctccagaaaacctcttgcaagtattttatttgacggaagtaaattttcaccttaaaatcttgtttgcagagctcagagacattcacaaagtaccaaaagctactagacactaaggatgcaacgtgaaaaaaatcattgtgtcctcagtgaacatgtagcctcatgaagggagacagacaaataaatagattatttccaatataacatggaaatgctaacggtaagttccagggaccacatgggcgtaaagaagagaccatccttagctcagcctggggaagtaagaaggattctggaggggaaacttcccaacaaagagggcccctagaaagcaaaaccagtagagaattggagataaaatgcctaacctttattgaatatatgctcagcacaaagcattttgctggatactgcgctgtgatttcactgaattgtcctaacaaccttgttggattgaaggctcagagaaattaaataatttgtccaagatcacacagataatcagtaatgatggtggtatttggaatactgttgcttctgatttcaaagctatgctctttctgcgatgcaggccttcacmaaagaattgaatttggcagtttacttatgtctgaggcagtccatactcaaagtctagttaatgaaaaaagcataaatgcctaaaaaaagagcatttaaaaggagacatatgagtcaccacaggaagccattgtatacgaaggctgtaagattgaggcacttagaagcaacgttcagatcctttgaagcttcccttgaggatgaaactgtgttttattcatctctgctcccttgttgattaacttagaacggagctactgagcaaatgtttaatgaacgaaygaatgaatgaatgaatgaatgaatgactcatctttgcccacttctctgaaggcagttggaaatcctaggacccctctcagttttattcatctygcgctctggccaattaatcccttctgtcctgaagattcagaatacattaaagcttttagatttctggccaatggaatatatttccaattcagacagatcatttcctaattgactaaraggaattcctatagatcagaaaaatgttaattaactattctattacatattaaatgctaaatacttgatgatcatttaaaatatgtttatgacatattctcttcttccaaaaaatttgggtagcaaggacttcctatacaagtttcaaagtgtcttctctatgtaaacatctaaactgtggtataacagctgatcacagataaaggggaaatcgtgcaaagagttctcaagttttaaagaaggagtgatcatcgacttgatcatccctcctgaaatctcttttgagtcaaaaagtggactgatttttagtccaatttgtttgggcctcagaataacctattttattagctaatctctaataacccttagatttgcattaccatatatatgtataaagtatctcactgtgattatctcatttgatcctcatagggtaccttcaggataggtaggaaagtgatcatgctgctgttttattcaagaagaaactgaagggttcaacagttttctaactcaaagcctgtttgactctaggtataggcctccttctttcatgacaagctcccttacctctaacgctaactactctaggaatatacctgatgggagcttgattggtgaatttacctcctggagttcttgactccagacaacagacgtcagttccaggtaacttatatgaaaaaaaagaatttattggagaaataacagatagtctacaagctcttcaggaagcctgaggaaccaggctcagaggccaaggaggaaatcctcctactaagggtgctgggctgtcaccactggccacttatagccaaaccacactgccatgaaaaatctctgtttctccatgcaccttacacgttagtgtggggatgctaaattcccaactggaacatctgcttgacttgccctgttgtagctgctgaggggtgggaaaagggaatagctgccccctccagcttctctaatgggggtaaggctgtgcctccttcctgtcttgaattgtccccaaataagaagcatatctgaacactgggtagataaatgataaatgaccatcggggattatttggctcactgagctctatttgaggaatgttttaggtctagtatcttaaggatcataagtgcttcttaaacaatagaaattatttcagagagaagcctctagtgggaggagcctaggcctgagagaataaaaggagaagaattgaagacaaaggatgagagacatattgtgtgcttcctacctagtaagaacttcaaatggtttgattactattatcttgcaggtcaaagttctgagattctgagaggttaaataatttggttaagaccagactgtagtaaaaggactggactctaggtctgcccagcttcaaagtcagtatttttttcatctttcacaccaactccatagattctatcaactttgatcatgttactcctccacttaatatctttcgacaagttcctcctgcctttccatccaaattccctcttttaatgacaaggagaagagttatctcctttgagtttgctctagagaggaatgcaatagartgggaacttgagggtagagtttgttttttgtaacagtgtttatatgttgayggaaatgattcagtagagagaaggaaattggtgatttatttagcaattcatatacatgtatattaagtggaagaagtggaaaacactttggctgtatggctgtgactcttatttgttaattatttgatttattgaatatctcttattgatttattttgtttattgctgtattcgaagagttttgaaaagtatctggcactttataagtgttcaataatgaaaacatgactgtcaaatattattctagtgtttataggaaatagagaggtatatcagacattgttctcaccttcaggggctgatagcttagtggagacataagatatgaacatggtcgtaatgcatggcagattgataaaaagaaacaactactatgacttattcttctcacgctgacattatttaaaatccattcatctaaaaaaaatccataataagtttcttaattccaagtatcatcttatcttcttcatcatcaccatcaccacttctgacaccattcactccaccacatgcaatgaccgctctcaacagctgacataagtggagagtcgatgagcgtcctctaacagcaaattgctcatacatgagctgcttctctctttcaaattcccaagggcagcattggccctttctctgctcaggttctgaacaactgcagagcttgaagcagcagatatcatgagttatgagatgtgaactttccagctagtatggaggtcagtaagcataagcgttatgtctgcatcatcattgcatcccagaacctaacccagtgctaggcacacacaggtgttcataggtgatgaataaattagatgaaagaacttgaagtcttcgctaatgggaaaggaaagcttttggagattttgttctaagttttttccctgaaattctcagaagattcttttttaagttgtctgtgacatctatgagccaacctattgcctggttttccagtttaagtgtcggttggttggaagagagaaatcctggatgaataacttaccagagaataactaaatatggatcagtagataggatcccaggggtagcatttttcactggaaaaagctgttcctatactacatatttgctgtgcttttcaaatgtcggggctcacttgctcatcagtgaatcagtaaaaaaggaaatattcccttcctcagttgtcaggcccacagtattttctgccccaggaacaactatctccagggaatattttcatttgaaacatccattytcttgccctgaaagccataaaagatgagacaaatcactctgaaagcaggtaccaaggtctggacttttcagcctgaaccatagtttaccttgttacatatgaaatgcttaggtatcgtcattctaataatgtggctgatagcattgataataattggttgtttctgaatagtacttttgatttatggagcaatttaaaatttttattcttatggcaaccttgagacaggcaggggatggtattattataataacaactttttatgaagaaaccaagcctcagagatgcttagtagagaatacaaagtgataatgttagatggaaacctgactatttagctgctcttttcttatactttttttcagttattttcataaactggcctatgaacctattgttcccgtaagacaataaataatatgtagtgactgggattatttcctaaaaatccacaagatggcagtaaaagattttgcattgaactggagacactagtggaatgtggccttttgcccagttttcatactagtgattgtatttgatcacagtattaaaactggttatcataatgatagctttttaaaatataactcaatgaattcaagtggaattcaaacctgaaagtaacatttgtgactttgtttattattattattattattgtgagggtcctgtatttaaacataagaaaccactaggaatcagctgggagctctgatagccaagatttcttgagaaagctcaaaatgagaaatgttactccttcttcaacgttggactgacctataattctcctgcttgaaggggagaaatagaggggtcaggaaaaggtcaatagttaatcttccttataatttgatttcttgttatttctctatgttcagaatctttcctggagggaaactttcctgatggaccaatgttgctgtaaaacatattccaggaacatttattgcctatatctctcaggttttgtgtgtaacataaactatactaagctatgggtagtttttcatgtacttttattattctactctcagatttatgatagaattaagaagaatgaagactatatttttcttttctttttcttttctttttcttttcttctttttttttttttttttttttttgagatagagtcttgctctgtctcccaggctggagtatagtggcatgatcttggatcactgcaacctcagcctcccaggtccaagcaattctcctgcctcagcctcccagttagctggggttacaggcatgtaccacaatgcccagctagtttttgtattttcagtagagatggggtttcaccatgttggccaggctggtctcgaactcctgacctcaggtgatccacctgcctcagcctcccaaagtgctgggattacaggtgtgagccactacacctggcctacatttttctttcatttggcggagggtcygcctccatgctgagcgggaactccctttgttgatggggctcgtgatcatcatcaggcacatatagacctgagtcagtagactctgtaattgagaacatcagaaaaaatcacactgtttctgtttctaacataaaggcaagcaagtgttccttagcatctcctttgtgtgtagcagacaggacttatgcctcaaaaagatggcagtggatttgcataaacatgtaaaaacttaaaartgaacgtcaggtatctctggttttaaagtcctttgggcagtctcttatgctacccaaatttatctttccccttttcctgacttttcttctctaatgtctttttacgttcatattcatagtcatttcttatgacaaagagtacaaccttaatttttgcttgcttgtcagagattctcttttcaccttgggtggctcaccatctttccctgaaggaaaaaatatatatagctttcatacccttactaacatagatttaaacctcctgtcaggaaataagatattccactccattcctctgtttattcatgtatcctctcatccctgtctacaacgaacttgataggggcttctgtgtttatgtcaccttgctatgtggaatgtaatgatgactaagccatgtgtcatgtccttgggatgcttatagtctaacagaagtaataagcaggtccaccccgaattatactataagaaaagtacagtgaggcaagggagttccatagaaaaggcaaaacctcaccaggtattctgaggaggattcatgttttccttggtaatggaaagaccttcccagatcctcactgcaagtctaagataaacgattttttcatcaggccacaaaggaagaacatgaagtccaatgcagaagttttgaaaagcaggagtgctcaagaattatcaacagcccagaccaacaagacaccagatgcaggagactatttggcctctgaataaacgggatgaggagtttaagcactgggctaggctaggaaaagcaaatagctcccaggagcaacaattcagttactcaggacaacctgaacaaactcctgatcttctcactcctctgtaaagtgaaaagacggagactcaggatctttaaaggcccttccagctccaatatgctaggaatgtatgtgtttgagagaactttgtgtgataaaaaggatgcactgaagggtttttgaacaattaattttttattagttatgactaaacgtatgttagttatgaataaagacttccctttattttatttatttattttttaattagagacagggtctcactgctgctagattgtgcagtagcacaatcatagctcactaaacctttgagctcctgggctcacgcartcctctcacctcaacttctcaaatagcyaggactatgaacatgcatcaccatacacagctaatttttaaaatatttctaagatactgggtctcaccatgttgcccaggctgtttttcaactcttggcctcaagcagtcctcccacctcagcctctcaaagcactgggatcacaggtgtgaaccacctcacccagcctaagacttccctttaaataataaaagttttaaaatcagaaattaaaattaaaggcatacattcatacttttttcagagtccattggttataacttaaccatccaaataaagtctcaattcctcgatatagcttctcttaacttgtccagccatatctctaaaagtcagtcttttctctgtcatgtaactatatctgacattgtatcctctcctgaaaactttccccaccccaccttcttctgaataactcttctattctattcatccttcaaatcttagattgttatattctctaaatgccttctcttgccattcccacttcaccttccaaaaacacacagaagcacctccaagttaggtacccctcttaatgtgctttgtatatcccatactcttcctatgacagcacttaccatgttaatttttaaagacatgtttagtactccattttccttactctattgtaagccaggacaatgcttgtcttgtttacctgacatataatatatcttataaatatataatgaatgaatgaagctagattactattttaagtcagtagattctgagtaaagatctagtaaaataaatgcatggccaactgcatgggcagtatacacctrtattgcgcaggacacaatgttaggtactgtccctataggctgattatttaaaggtttccagctgacaggaatgtgtgtaacctaaccaaacttgaagaatatttataagatattgtgtctgacatctcaaaaatcaaaatgagaaacaaacaaaatgtagttatatcttttgtatagcaaccactagagggcaatgaaagcaaacgttgaacatcctttgggggaaaggaattgtaaaatgttttctgattgaaatctgggcatataatcttatgtttgggatagttataggacctgtaggctgtggtttctgtgattatgggtttagtagttataattacctttctagtgtggaattcaaacctagattctctgtgataataacatcaccttacactgcatgyattatctcatatgaacctcctgtagcactaccagggaatatactattttcccattttccagtgaaaaaaaactgaggttcagaggcattaagctagtaagtagccataaggtagcaaaatattgacacaaatcctataaatacttattaactacttacatttaccaggcatacaaaattctctgctaagacagacagtctgggaaaatacaggttccaaaattaattgtaccagtttagaatggagacatatggcaacagctccttaaaagaagatcttgtggttttaggtagccatctgatgatgctgccaataggctaataggctggagcctatttacggaaatgtagtcctggaatgtgggaaggagacatccttctgtctccacactggttagactctatctaagctatatgttccactctagttgctgcatttttataaagatatcaagaagccacagaataggattaaggttcctggacatgatatattagagggtgaagggcaaagtgaaatgtcccaaagaaggagagagaaagagagggaattagacacagtgatgcttaagctataggctcaggagccagagtgggtccgacttggcatacctactaaaaacaggaaatgagtaattccagagatctgggttggcctcttatccatgtcagatattgaagagaatacttgtttgtattctccaggattcacacagagctaaagaagaagcctttttactgctttaatctgagcagacatcagaagcactttccagaggcccccatgaggcctgtgtgcagggagctaagcatggccttgcttggtaactgcaatagctgaagtaaagtgaaaggcactgaacattcaaacaggttctttcggcttgccccagcaagctcaacctgcagcttgcccaccactttcttccattctctgctccatccacctcttgtgtgtgtatccccaaggtgggctgcaggagttctgtggtccagctggagcgtaggcactatgggagtaaattttcttggccccaggataaatctgtgtcaccaacagagaacgcacatcacagggtcagctggcccytaaccaaccttcccacctctggttacgtgatggtaactatccagaatgaatttattgagaattttgcttcagaggaggttattcaccacagtaaggtctccattataagaactggatcagttagcatggcccgtgcaatcaccatgttattaaaagacttgagggatgaagttgcctttgtagctgttgataatggtgaattgaagggtgtgagacaatggatcttaaacatggcagtcttttcctaaaactgccagatagtgcttccagcaaagattatctcatctctgcaawctccaacctagtgattatcacatcaggtgcatgccaggaaaaaggtgaaacactttaatttagtcagtctaaatgtggccatcgttaaattaatgatgtctaatattactcaatatagtcctgctgcaaattgatagtttccagtccagtggatatcttaatttatgtagcttagaaattgagtacatttttcaaaacccatattattggaaatggctgtaatctggacactgcccatttccatttcttgactgtgcaagtgcttggaatccactctggaagctgccatgggtggatctttggagagcatggggactcaagtgttcctgtgtggagtggagtgaacattgctggtgtccctctgaaggatctaaactcagataaaggaattgatcaagatctagagcaagggggaaaatgtccacaaagaagtgattgccagtgcttatgaaattatgaaaatgaaaggttatacttcttgggccattggcccatctgtaacagattgaacagaaagcattttagagaatcctaggagagcgcattcagtttccacataattaagggcctctatggaatgaatgatgtattcttcagtgttcctcgtatctgagagagaatggtcttgcagacctyacacaggtaaagctgacccttgaagatgtggcccatttgtaaaggagcacagaaacactttgggaattcagaagaagctcaagctttaaagttgtgtaaagctatcattctgaaattatagaagaagagaaatagcagttttgggattatatataaaccttttgaataaacttgaattcctaaaaataggaaataggaaagggagtagagtaacggccctgtttatttagcctctatcgcttttattattagcatccagatgctgaatgatacttattttttacaattcctaagcgattgcatcaaagaaggtgtttttgatacgtctgatgtgccagtacttgccttgtatgtatatgcacttgccatttggtccaaaagaatgtatgatctaggtgtttattgttttatagaaatcctgattcttttaaatacgttctaatatttttttggtctgatgggcttatattatactcatttacatactctttttagaagtcattactttctctacaatgtaaaaataaaagtgcacataaagaaaaaaaagtgagtctgcatcctgactctgttgtttgtaattgtgaatttcggcaatttatttaacttctctgtgcctcagttttcttatcaataaaatgatgactgtgtctacgtatagggctgttatgaggagaaattgataatacatgtggtgtttagtgtaacatttcgcacctggaaggatttgataaatgttggctgttatttttgttgttgttgctgctgctgctgttgtttttgttgataaagcacttgcaagaccattctgcagaaatgaaggtagacttatttgtgttgccctagaaaatgccattagaaccaaaagaggcatcatctaaaagcaagagttcgtaacaggtttagttttaaatactaaaccatgtatcgcctaactgatcttgaacaagtcactcaaccttactcagtctccattttctgatgttactgaggacttaatgtgtctgttcactgtgctaagcactgtgggtggagtgaaaaggccttgtgtcactgcattgtagttactcaagcaggagccagctgaccatctgcaggcatttagagggcttgggagaaagcattcckgcaaaggatggaatttttttatcaaatctcagaggatcctataaacaatctttgtttctgctcttgaaaatgttggaaatgaaatttgttctcactttgaaattgtcttcctctgatacggcacgaggctggtcctcaaatggacttgcattcaaaagtatttcccttgaagtagtacctgccttttgagggtaactggattcctttatttctcaaaggttaagaagatgaaaaagtatggctttggaaccagcaagaggcttgaaccctgctttactatcaactagatgtgcaaactttggacaagtacttagcttccccaaactgagtcttcttatttataaaatggagccaatgactcctgcttcaaaggattgttatgggggttaaatgtgccaaggggtatagagcacccatcatggtgcctgacacaaagcaagtggtcctgccttctttgacagtgccaccaacagtcccagtgctcaaggctctaagaatgagcttcaactctaagaggaatgggcattggccttctggtcatcatcccatctcctcaactctgtaacattgtgcaactcctgccagataaaagctgacctcaagtacatttcccacaattctggtccctcctcacactctatggtacctaggggtctagtgtcctcatgctctttcttgtctgtccttcagtgaaagaaatcagatgaaggagttcacactgaggttgaatgttaggaaacaggcaaagcattattttaactaactatatcgagattttcacagtatatctactaagtttaagaccaaaacagtgaatctcaratggtgggattataggattcccagtaaaccttatgaggaaagaatttcagaaacatcataagtgcttcataggattattcatttatacatctcaaaaatggctacataaggctgtgatcttcttcataccaaacccaagtcttatttttattgatttcagtacatgacatgacacagcccctggcacattgtagatgttcaataaatgtggactagatagtcttgaggccatatcagatggacaaatatatttcttagcccatctattactgttaaacacaaccacaaaccatctataaaacacttgggatgggagagttggaagacatagaagtattttgctttagtgttaaggatagaggaaataacagttcttctagaaaatgccctgtaactggggagaatttcataggagaagtaggatttgaattgagcttcccaaggcaagggtggcagcatgacatgtggctacgaagaagagtgtttccagctcagtagacagatggaagttcaaaagctactagtaaagggtgttgatgacaagttctaggtagaagctagcttgttttgaaaacctgaaccccagcatacatattcttgtcttcattttagtttccttggaacactttaaacacttctcccacatttttctctcacacttctacacactcccagtcctcagtctctgccacatatacagcaggggaaaaaatagggctctctttctctttctctctgttatactagtttcctctaatcttttgctcagtaatatatcacagaacaactttcagctcattagctgacaactccaatgttgttcttttagaatggtcaaagatttactcttttccctgatagccaacaatacataagactttaatgtcccttttcacatttcctgaggctaaaattttcacaacatttaactcaaatttaaacttcctaaaactattttgggaaaaagaaccaggaagatttattttaacattatttttcttaatcaaaacagcaaatgtcgtgaattttacacactaaacatactttttagtgaggaaatactcttctagaaaaaaattgaaattgtacatgctatttacattaaaaagtagaaattaaaattttcttttagtgatattaataatgttattaggctgaaccatrtgaagttgccatttctgtaggtcaagttgaatattgtcaattttgtgtggttcaacctaatacagactcttgcatagaggttacagccatagattatactaagaaaagagtcttcaaagaatttagtccagaaaaaatgaatttattggtttactgatttgaaaagggtgcttaaacaaagcagaagtattcttcaatttcccatagtaaaagcaaaagctaccattcattgagtgggttttcatctgcatcaccttattcagttctcaatataactctgcaaccattttgaagtagatattcctatcatcacttaatagatgtacagagtcaaaattccaatcctgagtctgctggacaaaacccacactctttcccttctattacactacctcagagatttaacacagaagataaaccacttctccaaaatacaataccagttagcgtcaggacttggagttatgggtacatattgagttatttgcatagaaagcttgactttctacagttaggtctttgagaaaaaattctrtaaagtaggagatcatcttatatatactgagctcctcaagaacagaggctatctaaataatctttgaatccatgggacatggcacagaacctattgtaaatcataaataaacatagtaaatcacaaataaatgtttctagaataaatgagtaaacaaaagaatgacttttgcatgggaaaaggcagaataggttcatagctctttgcagaatcaaacatcttacagtatgtaggtattttaaaaccacaagatagaatcacagaatcataactccgaatggaataccagagttcctcttgtacaatatttgtttgtttgttgtttatttaataaacaaaggaactaaagtacaaaattccaaagctaaatgatgacacaagccagagccaaatctaccaagccttcttgaaaatatacctatcyctggatttttcttcctttaggaacataaatgtgctaaggtattatctactcatcaataattaccaaaattatttatatttttatacacagcatatatacatgtatacatacacacacacacataaacaattgcagcacaatttactttctttagggaaatacttgtttttattgcacacagcatttgataaatatcaacattagccaggaacttataggtgtgagaaagaaggcagctaaatacaagtttttttggttgaaaatcacacccattcactaatcctcaggtggacttgttctcaggaagaataatttacattgtcaaacactcacaagcctgaaaaagaaagaaaagaagggtgaatttgtattcatacaacagataccttcacacactttatcctggaaaacacattgtagtttatacaatttgttggtgagtgatttatgctttttatgcatagttatttgcttagtctcctattcatccaaaaatccatactttttcctggtttacctgactttctcattatgcataactttgaagagaagcaatatttagcaatgatgcattctctgcaaatggatggcatgcatgcatctgtcttctaatataatattcatggttttcacatctccaaatgtgaattttccccttagtgcttcttcaacccgtattttgtatcttagggccatacaaaaattgaaacatttcagtacttatttcatacttttaagagggaagaaaatattggcaaaggatgggtaagaaatggaggttacaatgcagatgatataaaccttgagctacatacatacccaaaagcccaaagttgagctattgttgactgactggttctaggcaaggactaagggtcagttcaggagcaaatatagaatttagaacattcagtttataatgatggtgttaagaagggggttgaacattcacttggttctttgatatgtagcaggtctctatagtagacaggaacaagtggattttgaagaagctccagagacctataaatcctaaggagtttctccagaagccctacatggaaaaaccctaacttgaggcttgtccttgacttagagtcacagagcattatgtataagcaacacagcctaagatagcatttccaaatgctagcacagataattttgctattttagttttcaggagcaagctcctctggcttgcctgtatttgacagctaacccagtgttttagttgtattgatggtggaatgagaaagatttatttttataagtctaattatgagactttcacagcacatcagtttggacttcaaaaggataacacaattccagaaattaggtggtaaacagccagtcataggctgtcttcccaataaagcacgataaatcaaccagagaagagaagagaggatgcagcaggaaagtagaggcagatcactcagagggaggtggtaagaaaaagcaagtgagaccagctgcaggaggaggaaatagacacagcccagccgcagaggaaaggtaaggaaggaagaagtgaagggaatctagtcacagatgcagagagacagatcaggagaggatcacagaggtgagaccctgcaggggagaatgggaggaaagggtgagggtataatagagaggaaaaaaaatgagaatcaagggaccacacctttacagtgcagtgtgcagtgtatggtgtacggtgtacagtgcagtgtacatggcaacttttccaggtggtaggagtttgacaaaagagaaaacaatgcaacaggaaactgcatgcaatgcaaacttggaaagggaaaagatagaggatgatgatttaaagaatgcagaattatatgtctgggtttcatggaactcctcgtgccaagaacagcaagggctagtcacatatattttattctgttgctggcaactgttagtgcagtgaatggagtttgagagttccaggtcctctgtttcaggcagcctccagtgcttcttccccttctggatgactgctgcccttgtgcttactgacttaatgcctcttggtctcacaagatgtggcagagcccaccgctgatcagaacctgcagccagcctctcacagaactggccccaatataggctgaagcataattcaaggaaggagctgggtgagaaggcactgaacttggccacaggaatattaaaagggtttgacgttaaaatgctctgggagattgttgtgctctctaatacccaaagtggcagagctgttgaggaaagctggtccctgcactgaccaagcttgccctaaagaaacagggaaacagcctgtagacaccaagactacagtatgcctggagggggctgtttactgagatggaaaagcaaagtggcccattgtgatgaccggcacgaggctgctgttagaaggcatgtgatattatggggaagggaatgtgtatgcgtggggagcagaagtagatttggaagcacatagcaacattgatgactgtcaaagataggagtgttacctgcagacctaaggctggagacagcaggtattataagagaagagggaagattaagtaggggagaaaggacacagtgtgtgcaccacacagaccgtatctcttatgttagctctgctactttcgaagcatctaatctttctgtgcctcagttttcccatcttaaagttgacctcagcaaagttcttgggaggattaacaataacaagcctaacacaataccctcttgttcagtattcagtaactagtattatctttattagtgatctccttccacagttaaattcttggtcacaaacagtttgaaagtcaattgccttgatttcttctccctttattccctctctccttttcttttctgttctcctgattcgcttttcccctccttcctattatttactgagcattcactttgtgctaggaactgaacgaatgcagtggaactttatttcttgatgtttttatctactgaatggattgtggctttgcagctccgttcacatctgaagctctggcaactaaccatggaaactcacaccttgctggagagttgttttctgcagggagcagcaattctatgtgctaaattgggaggctggaaagagagaattggttagtaattagaaaagatataaattactgaaaatacctccctgcctgtgtaaatggaaaatttttctgatgcttataatatccacttgggactgatagtgaaagattcagcacagccttgactgcttttatgaagtcttgatatatgcttcagagaacaaaggaaagtgatgaaggagagatgattccagacgatggtcactctttctcactccttattgtatggagtttgtcttttcaggagagttttgaaatgattctgttgctgcttctagttttcccaaatgtctagaagcattttttgaaatcagtaatgcttggagttaaggctgtatttatgtggtctgcctaatacttcccacaaaagtccacattcaagatggcagctccagtatagagaattatgcctttcaaggtggcaaagttggttgccaccttctagggtcctgcttgtctgctatattattctcctcgcttatactttcttttctagtttacatcgttttcactattagacactgaaattggccatgaaatccttggtgagctgattaataattcctctttagaggaacaggagtctttgtgaaccttaaggcttcttcagagttgaggaagagattcatcaagcacgtaaagctgtagtcaccctcagtaataatgtatgaggacatcgatttgtgccacatcctgggaaaacaagaagcctgaaacagtggctgggactgccctcgtggggcttacagtctagttattgatatttattcattaaaaaggtaaatagaaaaagaaagcaaatcacagaacatcgtgtgttattatgggatcattctttaaaacaatgactatatatggaggtaaacatgaatgtttttccactcacatatattcactcactgacaggaaccaggcactatcctagacattgggaatgtagctggggatatgtaaatatgtgtagagaaagtgtatagagttaatttgtctagtttattatcagtggttacctgaaggttaagatagaaagatgttcacagtttacttgctgtttttttgtattgttttagttgtttaaaatgagcttgcattactgctcacctgaaaaataataataaaagagtaaagaaggaccaaaattcatgtaatgctgccaggttgtggggctgatggccaagtaagtgtcacggaccatcatgattacaggaggtctgggaagatagaacctgacctggacaagggagaaggccaagacttcaaagaatccaggaaaacaggaagtaaaacaaggaggaggaagttaggcccaagggaataacattaggctagggatggacatgaagcttctagcagcagcagagggtttgcttaggagaggaggcgtgtaatgtaggacattgaactctagcattctcatctggactctactacaaatacactgagtgrccttggaaaataacttcattctctgtgcctcactttttccaccaatgatatgggaggactagacagaatccactctaacgttccctcatatcagagaagtatctggtcttaaaaagactagagagggttgtggtaaaagctgcattgtgaaagggcttaaatatarggctaagaaatttgcacataatttacaagcagttaggaacacagatgaatatgagcatctgtggcatgtataaaatgtgaaaggcagtatttaaagaaaagtagartggttgtgatatacaagatgactatcaaggtattgagagtagacaaaagggagagggaggatgggagagagacagagattagaggaaaagctaacatcaattagaagtctaccacatggtaatgagatataatatcatgctatatcaaaaaaccaaatatatgatatatcaaaaagaacaatattatatatcaaaaacattctaatatgatatataaaaaattatgtcatgatatatcaaaaataaatccagaatgatagagaaaaattatatatatatatgggagaagctctcctgcacaaaataataccagctaataattctagaataaataaagaatttataaaataaccattttttaacccgctacaaaataactatttcaagaaagcataatccatagatgctaaaacaattaggggttaaagttgactggaaaaaggatatttacatggtctcaaataaaccaccttatagattgttatttgcaaaatagaaaggtgccttttaaatgaagagatctggtggtccatgtattttgagcttcctgctatgacgcagtaagaaatacacagcattcattacacactggattttgctaaaaatgtttcacctgattctgaagaaacaatcagacaaattcaaaatgcagaacactctataagcatctgactgaaattatttttaaaaaaagagtaaattttatttaaagaaaaatgtaggtaatgttcaagactaataatgactaaagacatagtaacaaccaaatgcaatgcataaaacttaaatcctggatttaagaaaaaaatctgtaaaagacatttggaggataacggaggaaatttgaataggtgcaatatattaaatgttatagaaatattagttttgtttgctttctctggagtaataatggcattgtggttatacagaaaatgtctttacactgggaagatgccttgctgatatgttagattgaaagtggaatgacgtctgcaacataattcaaatggttcagaaaaagtgtgtgtctgtgtgtgtgtgtgtgtgtgtgtgtgtgtcttctgctaggcagataggtaggtaagtggagagagtgagaaggaggaagagagggagaacaaatgtaccaaaatgttaagaactgttgaatctttatgagtttttattataatgttcttcaagttttctataatttgaaatttttcaaaataaacaggaaacagggcctgtttcaatagttcagatcaatgcttagaactagcatagtaaattagaaaggaaaaaacaaaagcaacagatattttgaagagaaatagtttaataaatattatttctcattcatagtggtgaatacaagttgattttcatgcatctctgtttattcagatctcctcctcttgatttgactgattgcagttgggaagattttgacttcccaaaaagatttgactgattgcaattgggaagatttgatgaaagtaattgggaagaggggacttaagagttcttgacacagtttgcctaaactcacaaaacctgtttcttgggagcttttaggcaatgagatgattaccttatttttagatgaggaataagtcaaagaaatactaagatgtaattatgggcaacagccagatgccaagatacacataagcccaaacacaaaagaatgtcatcaacttgaggaactangatgaaaaaaacatcagatgagtcccacatgcagcagccagagtttgagttttgcattaacagattttgaccaagattaattccattaatatattattcctgctcaagcctttcagatgttttaggagtggactgtttgacagatatgtctctggaggcagcattattccttcctttaaaattgattccaaagcttatgaacaagattaattgtgtatgaggaaaaaaggaaacaagaacccttttcacttacattacaatctcactcagattagtttatgtaaactaaaccaaattagtgaatattataggatatgtagaaatgaacatccttattgctttcaaatctgtatactatttagacaaattcctagttaataactttgacccagaacttagccaactgaacttgtttgaacaaaataataaggttcactgggaattagggcatttatgtgaaaaatggtattgattcagtatttccttttgcaggtgttattgcacctttggaaggacattttttcactatgcctgattgtgccacggtttgcaaaacatttaacacacatgagccttctacaattaatgccaatgctgactcctgacttggacattttaacaacagaaaataccatcccccctcacaaatagacaccttttcatacccagttgagaactactgttagattctaagtcacttagggctgaaccattgctttcttcaccaatccatcccccaaaaatagcacaatgactggcacaaagaaggcattcagtaaatatgtattgaatggattaatgcaatgtttgaaaatttgattaccctaggactcatgttttctataaatattatcatattttaaatttgcctacataaccccttttgccttttattgctaaggtaacacaaacctcaaattcagtagttaaaacttttttgtatgacttttaaaattgttatgatacaacatatttacttaaaaatattcacatactgttaagggctataaaatgaaatgtaacccattctctcctcttcagcatttctcccctccccaccacaatrccatagccccttaaagcctctgttatcaattcactgtgtaaccttgcaggcattctctataagatcattcatccttttctttttttgaaacaaacaaactagatacacatatagttctacarcttgcttttctttaatttagcaatagataatgacttttttttagtttcaaaatattagacatgtatgctgttgcttttaatgactgcatagtattccattatatgaatagttcattatctatttaatcaatttattattgatagtgttttaacagtagattaaatagtgatattttaatacctgaaacccagaaatcacaaaaaaactaagtttaaataaagaataatagagcactttcagttagtccactgatttcaaaagggagaacatgttgagcaaattcagaaggcttttttcttaccaccatccaccagagaaaggatctcagcttcaaatttaaccctaaccaaagggaatctgtcagcctagcagcacacacacatctcatctcaggatagaacatttggtgggtgagttgagaagccacaaagcagatcttgaagggtaggaatttagccttcagcccagagtctgacactgcctgaacaatttagaggcttggatgaagtggaggtggttgtttaacaatgtttgcaaggacatttaagacatattggtgcttcaaggaacatattggttgctctacaattttttttttaattagcgaggcataatggtgcatgtcatgtcactgctatctagcctgagcaacagagtaagaccctgtctcaaaaaaagaaaaaaaaaaagtcttgggcctcaccctcaaagatgctgattcagtgagttcagtttcatcaaccattctccccctagaggacaaatgccttctgaaaaggactctaattagtacctggcttataacaagtgcacagtaactggttgtcaaataaattttaatgatttaaataaagttatgtgatttaatagttataaccattcattagtttaaggaatattgttgaatatctacatagtgtagtcagcactaaaagtatggagttaaaagagacactcaaggtctctacttatgggaagcttttctcggggtgggtgagataataaacagaataacatgtgggcctaaattctgtaagaaagtaaaaccagatgaattagagataggctgggaggctactttcaatgtgattgtcagcaaagagctctttgaggaattggcatttgagcttatgaaaataagttgtcaaagatgagaaaagctaggtaagagcactccagtcaaagggaccactggcataaatgctgtaagactggaggaaacttggactgatgcaaaacagaatgaaggcccttgtggccagcaaacagtaaagaagacagagtggaataagatggaataagagggataggcagagcccgaggaaaggagtttgaatttcattcaaagtctaacaaggagccaaaagaaagattttagcagaggagaggcatgatctgatacagagtttgagatcattctggctgccgagtcaaaaggggatagaggagggtgggaggagtgggccacagagacaatggagggacccatcgaggctactgtagtattcccagggaaaatgatagcttggcctagagggatggggtggagttagagaaaatgcatggaattagaatatggctatgaactaagggattgcatggggaggtgggagggtaagaaatgaatggaggttcttgattcagtggtttgagaggagaatggtggtagtactgtttgctgaaaatgagaaaactctcgagaaacatgtttgggagaaattttgagtttgattttgagcacgatgagtttgaaaagtcttacacatctatctgcagatgtcaagtaagcagatagatttcaagtctggagttaatgtaaaaatcagagcttggagatactagtatcagcttgtgtttgtataatatttgtataaggtttcaactattttttgcttatatattcttataaagatagttaactttttacttgaaatgcatgaattctagatcttactgtctttcagcctttaataagctgggtttggacagccaagttatactttattattttcatttaaagattccaaaataatcatccctctagaaatgacctggtaatccaaaacatttttaaaggtctaattttttttaactataagcctgtttttgcatcaggaatccaaatttaaagggaagttaatgtttaactgctaagatacataaatattcaatatcaatttttcactttgcctctgctccagaaggattctagtcttgagctgtaatgcatatactgtcagaaatattaccactctccacaaagtataacagcctccaggaggrgaagggaacttaattagaaatttccacttcaaatacaatttatagttcactcactcygaaacatgctggagggtatttgaaaaatttaatgcataatgatctgtttgtctcaagttgtcaacaaaatacattttgagcatagaatatatttgtttattaagcattagacggtacctctgtgatttagtatgaggctctctttctagataaagaaactgaggcccagagagatgaaggggcttctcaaagtcaaataagctaacagcatgactggaactcagcactcctgactcctaggattgtgcttttctgtttcagtgccttcaaccctagcacttttccctggtcaaatgagcctgcattgagataattttatactctcccaagtcatcctctttgtgtacgtcaggagagggttcaacaatagmtaataattatatgcccttactagatgccaggcactgttctaaatgctttacatgtattaactaatctaaccttacagcaactctgtgatgtggtactcttattatccccatcttgtatatcaagcttcttctacatctgtgtctaatttgaccagggtactgaccacaggaatatgaaatctaaaatgattttgaacattggccacttctctaagcttcaggtagatattttctaactgtctgcaaaactgtagatatccaacagacatagcaaagtcaacatgtctaaaacaaaatacattatcctcccacccaaacccactctccatcctgtgttcctgtcttgattaatggtatcatcacacctccaatcatcctaaagctttttgacaccttccccatttcccattttcaatctgctcaacacagtaaatattatttaaactctgtttggcttccagaagtatttgaggagaatagctgcatagaatcttcctctgttttcctctctcaaatttgtgccacatctcccaccctcaaatccaccctcatttgcctaatttgggccttaattatttgtatcattggtaacacttcaatagtatcacatccgattatctactgggatacttcctaccctgtcctcacttaattcattaaccccagtttctcactgttgccagagttgttctcccataaacacaggtccaattgtgttaaatgcttctgtaaaacccttccatagccacttattgacaaaacttcttgccctggcattcaaggtctacttctgctggcagcattttttctttctccctatctatgttctatgccagccatcagactgctcacaattcaacattgaatgtgatatctgtagtttccctgttacccacataagtatgtggtaagatcatttaatacatgtgaatttgtttattctatttgttagtttatgtatcaccttgttcagtaacaaatgtgaggtggggaagcagtttactaactgtgaaatacttttgagatgttatttttaagccatagaaataattaaatttacaacacaggggaccctagagatggtgtggcccagcaccttcatttttcagagcagctccttagctggcttgaataagttgatggcagagttggcaacagaacttacattttcacttcgttgcatctcatcacttcaggaaaaatgaaaatagatttttttccctcttgaaaaagaacgggagccttctacatgtatttaatacactgtaatacatctgttcatcttcctatccatggtctctctgaataaagtagagatagtttggatcctacaccaatttcttccctgctgccccctgccaccttgcacccagacccccaactgtgaaattattggcttgaaacagtcccctgtgttctgtacctgtctcattttaattgaaatgtggtgccaattatctagccttttcccatttggttactcctttgtatttttttcacagttaataattctgttaaatttgtagttcttacctacttttatcctaagatagtcttctaccaaacatattctttggttttattattgctaataaaagccagttaaaagtcctggtcacatagataatggatatgctataatacacatagcaactatttagtaagtacctaccatgtaccaaatattattttaagcattttatttgcttaaactctaataatcctgataacagcctaacaaaagaagggttcacatcttttgatgcatatgaggaaacaagttcaaagagattaaggaacttacccaaagtcatagagctggtaagggaagggaccaagatttgaatcctggccttcccgggtctaaacccagtattcttcccaggacactgctttcagagcaggcagatgacatgagctgtggtggaaaaccttggcagccatgagcatttgctctgccttctaagcagcatctccaagggggtccatccaacctcagagtcctgtagccaggctggccataagcacatgcttcctgcatattcccttcctgtgcattctctctacctgtaagcactcctggggcacaagaatgacgttaaaataatatttctcaattttaagctgaggaatgactcctcattatggtcaaatatactaaaatggcttatcatgccctggatcaccagatccttgagaggctatgtcatggttaagaatgcaaacgcggccgggtgcagtggctcacgcctgtattcccagcactttgggaggccgaggcgggcggatcacaaggtcaggagatcgagaccatcctggctaatacagtgaaaccccatctctactaaaaatacataaaattagctgggcatggtggcgagtgcctgtagtcccagctactcgggaggctgaggcaggagaatggcatgaacccagaaggcgaagcttgcagtgagcgagatagcaccactgcactccagtctgggagaaaagagagagattttgtctcaaaaaacaaaaacaaaaacaaaacaaaaaaaaaaagaatgcagacacttaaaccacactgcctgggtttcattcctgactttgtcatatgttagcaatgtaccctcggacaagttacttaatctgtgcctcagttaccacctctgtaaaatggggattgttgtgtgttcttacttcacacagttgttatgagggctaagggaatttctgtatatcaaatgcttataacagtgcctggcacatattaagtgttatgtacatgtcagctaccatcatcaccatcatcatcatcttcttcttcttcttcttcttcttcttttccttcatcacttctttctcacatttgttcctcccgtatctacccttcagtaacaactgcttcctgttcttcagatgtgcaggccctctctcacctccagccctccatatgtgcctccctttctgccttgaatactcttgccactggtctcctcaccccaatctccccctctgtgagaacctccacccatcctcaccttgctaacattcatgacctcatctcaatgtcactttctccaggaaagctcattcctcctcatcccttggtaggaatgcctcctctgtacgccacagaattctgactttttttgtgctagcacttaccgcccagcatttaatcatgtgtttagctgtcactgtcctgcaatgaacagcacattgcttgacaatggctatgtgtcactctagttcattcttcccttaaactggaaagtgaaataactaagtggatactttttaaaaaacaaatatatttcaatactgtgtttatctctaggcactacrgtaggcacacattaaaagatagtacagtgaaccatagggtaagcatccatattgccatatttgatctcacaatcacttatctgagtctctaatgagatattacattatatcaagatgctggaaataacacccataagagataacaaaaartagaatttagaaactagggaaggagaattccctgacacaggaggtatgcaagcacaagcaaatggtcacttggtgagaatgatatgaagggatgcggaagggagtgggatcactccctggaaaagtgaaaaatgtgttcaaatattaggatcatatagaagaagaaatgatattgttttrtgagccatcagagggcagaactgaagccaagaggtggaaagaaagattcaacacaaagaactgttttggtttttttcatttgtttgttttaatcactggagctgacccaaacagaatggattttcctgaaaggcagtgagttcttcattagtgttgatccagtgtcacatggaggttagatgatcatttgcctaggataatgcagtgagaaaatattattcactcatccactcacttattcactcacaatcctcttttattcttttgcacctattatttgcctgaccctatgccaggaacacaagttccaataagcagagatctgacttttaaggagcttataaatagatacattacacaactcagtttgaattgagtctttaagaactagaagaagttttccagatgaggaaagagtgagaagctatgttctagatatggaaaatagcatgtgcataaatgcagaaatggctgaatcagagaaattttaaaaggtcaacatggtgagggacaagggtataagaatgtgtttgaatcagcctaatgatataaattggggttgaagaagatcacaagacttcctccatttttgaaatcctctgattctgatatcattcattctatagcactaagaaatagacaaatatttccagagaatcatcatttattcaaggaataaatgcccctagtgggagaagtagcaaatataatgatcatctcttaaaaacaaaaagaaaaaaaatttgaccttgggaatggtaaaccactcatcttcacattaagatgtgaaaaacagcagcagcaacacaactagaagtcaactaaaagtgctcaaatttctattcattaccaatattattgtgaaaaggatgccaaaacatatggaatatatatgtgtatgattaaggaacttacccaaatagatagatatagatatagatatagatatagatatagatatagatatagatattttttttcttataaagagtctcactctgtcccccaggctggagtgcagtggcacgatctcagctcactgcaagctctgcctcccatgttcacgccattctcctgcctcagcctcccaagtagctgggactacaggtgactgccaccacacctggctaatttttttttgtatttttagtagagacggggtttcgccatgttagccaggatggtctcaatctcctgaccttatgatctgcccacctcggcctcccaaagtgctgggattacaggcgtgagcaccgcgcctggccrgaatataaatattttaatgatccaataaaagtcatatacataaagaggtagcaataaatgaaattgttctagcttgacaatgccttttgctttagccctacatgatctaatcattataagttgggccataatttctagatcaggttgcttttggaccaccacagagcagagtggcaaaacacacccaatcatctgctgccagtctcagggagcttgacttatgcccttgaaagacaggtttcagaactagaatcttgtaggcgtagaccctcggaattagacaggatattaaattacagtgtaaattggtagttaggaactcaggagtattagttacattattttagatccttagcctctttccaccatataaatttgagtaagtcagtgagtctctgagcctagttttcttatcagtaaaatgggaaaaataatcccaccctcctgaggattaaatgaaataatatataactatctctgatgtacatacctgatgctcaattaatgttaacaattattattattaatctcaacaataattaatggcatccaatctttgagaatgtatgcttcaagaaaagaatttttcttggagaggagaggactctaaatagaactctcagaatccatgcatccaggtgaaaaagttcaaactgaagcaaaaaaaaaaaaaaaaaaaaaaaaacccattagtaaatatatgaggctgtgtcacacttggtattttaaartgtcatatcaatgatgtaaactgtgaatacttgaaaatgttatttgttcaaggtttactgataaaaactsaaacctcagggatagaaataagaatcaaagtgatcttgaaaagtttgaaagactggagaagaacatgtttgctaaaaccagggaagaaatcaacaggaacaagggcaatatgatatttttcaggataacagcagcaacaaacctctccaaaaatgcagaggcccatgtagatttgggcctaaaatgaacaagattttattattggtccagtgaaaaagaaacaaactcacatattagagcacatctgctaaactagaaagaactctgggcttggcaagaggagcgcttggctggtcctatccctatgctaacttcagtatgactttgggccagtcccttcctttacggggttcatctctaatgtataagtgctagacaaacaagtttctaaggctcttctactcctaaaatgttgtgttcctctttttaaaaaaagcatgaagtaactaatatattgcactctgtgttggttaatttctattagattttatttcatcacttataatcacagctctttgaagaaatgctaaaacaataataatagatactatttgctgaatgcctgtttatacctgcaacagccctgataggtaggtaggtaggtaggtatactcattttatagaaaaggaagctaaggttcaaagaagttaagtgacttccccaggttacctaggaaacsyaggtagacttgagatttaacccgttttgtctaactgcaaatcctttgttccttcccatttttccatgcagttttcttaatgcactgaaaaaaaattcagaggatgactagaatgatgaaacatgtagaaatcttatgctgtaaaggaaacgtccaagaaattgtggctgttcacttggttctcacatcaaacattaaagtatattccaattgattaaggattaaatggctaaagattaaactatagtttgctacaggaaaacatgggtaatttgttaaatagattggtgaagagaaaatataatctaaaacttaagagccaaaaaagaaaaggaaattaaataagacttcactaaatgtttaaaaattcastctatctatgatatgaaataatgtacgaaagaaaagttaaaatacaacagtacaaataacaaactaagaatatttgtaatagttacctaagaaggaacaataacattcttcatttgcagataattttttgaaagagcaaactgcctaaacaacaacaacaaaaaaagcaaaataaataaaaagggattttatgtaaaaataaattcaaatatccaataaacatataagaagatgcttaaccttataattgaagaaacacaaaatttaaaaataaaattgtttacctatcagaatggaaaaagtcaaatgtcgaggtatatgtaactattacaagagtgtgaggaagttgaaaatcgtatattatttgttggcatataaattaatactacacttttagaggcagtctggcgatacctatcaawatttgacattcatatcctttactcaacaacttactgttagatgatatttattacctcattgtttataataacaaaataatgaagctacctagctgtctatcagccatgcactggtaaaacaaattgtttttcattgaataatagaacactcatagctattaaaaagaatgagattaatcggaagaaatatgtaaattagaaagctgactaaggtatattagtaagtggaaaaaatcaaggtgtagaacatgatcttatttgtataaaattttaaattatatattttataaagtggcttatattcacaacaaaaataattagtagtatatacaagaaaccattcacatgattacctttgtagagaataataggaggtaagggagccttttaattgtatgtcttttcattgtgccttacttatgatatatggatatgatgtgggtatattaattttatttttcatatcagtacactatctgggcaattcrattatggcctgtttttgttttcttatttattagttcctatatgtttaatgaataaataatcattttgaaaatgtgcaatagcaaattaaaaaaaaacaagtaatgcatataccctttcaccaagaagtctttccagggaacttatccttcagaaacacttttataagtgttcatagyagcagaaaaactggaaacaacctyaacaacatcaagagggatctcactgaaaagtgctgggacatccataacatggaatactgggctttcattaaaaaggtagaatgatatgagctgatatgataatgaaagatgtccaagatacattgctcaatgaaaagcaaaacaaaagctgtcaaattatatatgttatgatctattcagttaaataaaaaggcaataatatattaaaatatgtatgtaaggagagcaagagaaataaagtcatgtgcttgcatgtgcatatagtgaatctttaaaaagtacacacaagctggaggaggaggaaggaggcgggagaaggacttgctggaggaaaggcgagcgcagcagtcacgccggtcctgggagaggaagcgtagcccggccaccttcggagacgggctcttccctatgttgcccaagctggtcttgagctcctgggctcaagcgatctgcccacctcgaactcccaaagtgttcggattacaggcgtgagccaccgcgcccggctgaccatctcattccatcatgccagaagtgaatcccctagtattttcatccgttggattaggtaactagtcataatgaagaaaatcagttttaaaaccttctggaaatcctttaacttgaataaaagtaaaaaataaactgatttcatggtagtacaacaaccatcgctagccagtgactttggaaagataattcctaatttggtagctgctatggtaaagatatggccaactgcgatatcaacaggaaagacgaaaaaggtggaaaagaaaaaaaagacagatcaaaaagcaaaagcttgatggatacgttaaaaaggcagctttctgccaaacagaagccaaaaggcaaggcgggcaaaccctctgggagctctgccgatgaggacaccttctcctcctcctcagcaccgatagtctttaaagccgtgagagctcagaggccgataaggccacctccctccgcagccatcactgcagtcccatgccatggcctcttcgacccacaaactctgaggagacgtgcatcaagatggaggtgagagtcaaggccactcttccagtccgagtccacccctgaatggcgtccgaaaggatttccacgaccttcagtctgagaccgcgtgccaggaacaagccaattcactgaaaagctcggcttctcagaacggagacctgtatcttcgcctggatgaacatgtgcctgtcgttattggacttctgcctcaggactacattcagtatactgtgcctttagatgaggggatgtgtcctttggaaggatcaagtagctattgtctggacagttcttctaccatggaagtytctgtggttccttctcaagtgggagggcgytctttccccgaagatgagagtcaggcagaccagaacctagttgttgccccagagatctttgtggatcagtccatgaatgggttgttgactggcaccacgggagtcatgttgcagagccccagagtgggtccgcatcatgtccctccactctcaccattgctacctccaatgcaaaataatcaaatccaaaggaacttcagtggacttactggcacagaagcccacatggctgaaagtatgctctgtcatttgaattttgattttaactctgctcctggtgttgcaagagtttatgtctcagtgcaaagtagtggtcccatggtagtgacaagccttacagaggagctaaaaagatcttgcaaaacaaggatggtactggggaccaatcacatgttgggaggcagaagggaagctagcagtcctgccagatggttctttccttgattgggacagttctgaagactgttaccttttaagcttgagctttcgctcccatggtaaaacagttcacactagacttgggcactcaaatggtaggtttagcttttatgaacagccaaatgtggaagggcatacatccatagttgatctaattgagcattcagtcagggactctgaaaatggaactttttgttattcaaggtctcagctgcctggatctgcaacttaccttgtcagactggccaagccagtgtctcggttcatgcaggtacactcgttgcagtacctgtgtcattttgttttatgtcagtataccagaatagacttaattcagaaactgcctttgccaaacaaaatgaaggattayttacaggagaagcactactgaaagactgagaaccctgcatcttgcactttgggaataagaaaaagagattgaaacacagtttacaaactttcattgccatcaaaatcttttgctgccataactatttcacttttatgtataaaagagtcatcagtggtggctcacgcctgtaatcccagcacgttggaaggccgaggcaggcagatcacgaggtcaaaagattgagaccatcctggccaacatggtgaaaccccatctctgctaaaaatacaaaaaatagctgggcgtggtggcacgtgcctgtagtcccagctactcaggaggctgaggcaggagaattgcttgaacccaggaggcggaggctgcagtgagctgagatcatgccactgcactccaggctgggcaacagagcgagacttcgtctcaaaaaaaaaaaaaaagtcatcagtttgtttaggggtggggaagtgtcagcaaggtgtcttgggtttattttggttatttaaaaagggaagtcttgaggttttagaagtgtgaattacctttcctcaatgtgcagaataatcacaatgtgaattatcaaattctcctcaatgctgccccccctcccgccccgccctgtcctttgctgctatccactgtgatttttatgcattaaacagaatggaaattgctatgtctttttaaatggcccattttcaaaagatagtgttgaataaacatacccgtgtgataaaacacagaatttacgtatacactgaagatgaatttttaatctattactttaaaaagatttatttagaatcatgaattggcatactcttgggtaatggaatggagatctacaacatatcttctaacaacacttttttctaaattatttcttaggttgtgctaattttattggttgtgagaagttgagcttttcygttgccttcgtttcatctgttgccttcattttcatcttatagtttgcctattataataaatggccttacattaaaaaattgtaaagaaatgtttaccaccaatttagaaattgttgccttttctgtcattaaactcaggtacaaattgccataacatgaaaacctatggaactagaattatgattaaagaaatattagatgatcctaaaagaaaaaagtatccataaaagtggttccactggaaatggagatggtgaggggacttttacctcttccttttagacctttctgaaacagaatttatttgccatgatcacattttattcttttataaaaagtaaaccttaactgtttgacaagagaataaattatttggcatgtgaagtttgtgcaattcagcctcctgtaggcagtagcctggatctaattacctttcctgtctcttctggccagcagattcatacttctaactcatcaatagcctagacagtctctgaaatgactatatctagcaagaataactcaagaatagatctggaattttatactttaagggggctttagattcatatagcctaacagtctcttccctccgagggaggagaaaattgagtctcaggtagtatgmcagtcagcaagagagtggcacagccagatcaggcctagctcagtggactccccaatgttaccatgtaatcaatgctttctgtaaggagttcaccacactagaaagccagggatgaggcaaggaaaattacaaaagagaataaggagatgttaacgaagttattatgagaggatcatgatgtggaatttaagcgtatggatgtcccaggcctgatggggaaacaaagtagtaaccccccatctgccacccaatgtcattctcaaataggattgatgaaaagcaaaatacgattatacattttgaacgtgtataagctaatcagttctttattcttctttcatagcccatatcaacctgccccatgaataaaaggaagcagaattctgctatcatctgcaaaaagttagttttttgtaggttagaaacccatacttactgtgtgttcatcagaaaaacttcttgagggcttatcttgtctccctttgtgctccactcattgtccctcttctggggcagacagagaactctgtcattggagagcacttattaattacattatattgacttaggctgaactgattcaagaaaaattttagcattttcttcttattaaatttgagttaagaatgcctttcaccctggcagagtttggagcttttaagacatttctgtttctctttcagtatgggacccaaaatgggagttagcaatagctaaataaactccaggcactctttatttcattttgtcagaatttattctagaattgtatatgagaaataggacagtcaagtatatattttaaaacaaggcggccgggcgcggtggctcacgcctgtaatcccagcactttgggaggccgaggcaggcggatcacgaggtcaggagatcgagaccatcctggctaacacggtgaaaccccgtctctactgaaaatataaaaaattagccgggcgtggtggcgggcacctgtaatcccagctacttgggaggctgaggcaggagaatggtgtgaacccgggaggcggagcttgcagtgagcagagatcgcgtcactgcactccagcctgggcgaaagagcgagactctgtctaaaaaaaaaaaaaaaaamaaaaaaaaaacaaggcttaaggctgtctaaccaggctcaggatgacaaggctagacaattgaccacagagagggatttggcaaccatctggccccattttataccatgtccccagaatctcatctgaatgttttaatcttttagcatatatttgtctatttacattacatgtgtctctctttatcatcctgttttccctctaattttgaaggctcatatttatccctatttaccctagaaatctaggaagctcacagaggcatattaaatgcatacactagaacatgaatagataaaaatgtttccaacccggtcagaccatggcacaaacaccacaaggtgaaatttaatgtctctcctaactaaaagtgattaagatcatgaaagtccacaaacayctgagtaggatatgaggggtttctgaggcatgtgatataatgttagacagcctggttttgggaaacttttttcttctatcaggataatatgccttatgaaataccaagattctctggcttcctctctttcaggtgaatggcattgacctccgtggtgcwtcccacgagcaggcagctgctgcactaaagggggctggacagacagtgacgattatagcacaatatcaacctgaaggtcagtcagaactcaaactaataatgttctgatatgtctctgtgtggatctgtaccctcattactaataatttttattaactagagtcaccatcaytggtgttttgtaaacctacctatagtgaaaaattgatggttcatgtccaaagaacgtgaaccgtggctttgttacctctaatcttccaggaaaatatcaagcagttagaaaggcctatgaaaatatgaattcaaataaatagcaaccagcatcagctttatttcatttatattcttatgtggtacacactttcggtcaccaatggatactgtaaaaacagttaagacttaagaagcaaaagggagagatttcatctgcagaaatagaccagtagaccatattctctcctcatggcattaacttaattctcattaacactaacatggcttttgggggtgcttgattgacattttttttgcctttactcctacaatatcccttgtttgaaataaatcactgtaaaccatgagactcagtgagatcatgtaaattagattagccaacttaaacttgatgagatatcctaaattggattagccatgccctgctttttggtttatttaaacatctgtttccgtgtttaaaatgaggctcaatgagacaactgggatgttacttattgtatggttgatttcttagaaaattcatatataggttgctcctttggaaatgaaacgtacttaatgtaagcacacaattatgggtcagatcttgttactaaaaaaagaagaggaaaatggctactgtcttcaagaaatgaagcgcattgcttttggtccatatggctagcaaagaggagtattaaacagctgaacatgagagtataagatgtcatcaaggaagagtctctgtgcatatgagtattaggagctccttttcaagtgatgatttgttagcatcgatgggtctattgttgtttggaagactgaggtttgtgtcttgcctgtgacagcttagatcttaccattaatggtggccaatcacatggtctgcccatgaataaagaaaatattttcttccatgcatgttttgacatgttactttcagttgtgcctggctttagaattagaatttgaaattaatttattcaaaatttttaataaatgttttttcctatgtggcctaggccagatatggccagagagtgggaaagaggagatttgtgatggtcacagatggatgatgacaacaccaaggaaatattctcttctcagatagttttgaaaagtctttctatttgctaaatattagtagacttgtatttcagtagggacaaatgctttaaaaattatccatcataggccgtgtgcggtggcttaagcctgtaatcccagcactttgggaggctgagacgggcggatcaggaggtcaggagatcgagaccatcctggctaacacggtgaaaccctgtctctactaaaaatacaaaaaaatagccagatgtggtagctggcacctgtagtcccagctactcaggaggctgaggcaggagaacggcatgaacccgggaggtggagcttgcagtgagccgagaccgtggcactgcactctggcctgggtgacagagcaagactccatctcaaaaaaaaaataagtatccattataaagctgaaaattaaaagatatatgctggtaccatttgaataacaagttctacttcatatagagtaagaactttttcatcggaatcttccattttcttaatagctgtttttttcagtctcaaactgtatgtccttcaccatcgcctgacattgcaacataaatgtccccattttcctgtttctgaaaaatctcatctcaaacaattctgcagacgataagatggttagaatcatagataagcaattagaagctctcgatagtgatcaagtgttcaaataaccttgaacagaatgacttcaagctttaaagtttacataaaaggacaaacatgtccctgttctatcaatgtagatcttcatctttctactggagcttccttacatcttggtttcctttaagcaatatgtttaatttggttactatgctgtagtttatcaagatgcttgttcaaagcatgtcctataaatcatacaaattgatttttaaagtgcttgtaaagaaacctgcagataacaacaagctttttacaaaatgccaaagtacagattggattcacagaatgacttctctgttttaatagcctaactgtatactaatctgttgcagctttaaattagttggaaatgtggtaatggcaacatcaagcaatcagatttctttcctctcctatccaaactttacgtgtaactgagccttaatttaactgcagttttcaatgaaaaagtgattgaattattgtttagagacatttaaattgtacaacagttttaggaaataaagaataatttacctttaaaataacaaatgaaatgaagagtgcctcatgagattccattaggaaattctcaccaagtgccctttatctgcacccatattgtaagtcgttcaacccttaagacaatgctggcagatgattttattggcatacttttagtatggtcaagaattagactttcagtgaatacatttttcagtcataatcaaatgctttatcaaaaatttcctaaatgyatctgtcagtattatcagatgctcacaaaaatctgcccctaaccttaagtaataagcatagtctttgtcttcaaggatttttttaatctagttgaggaaaagagatttttatacatttaatagagtatagttcctggtaacatatgatcagattgaatgatcttagcagcagtatttctaggaattatggaatgtcagagaaaggataagcctgaaggggtcaggacagtgcaagagtgcaccatggaaatgtggaaatggagccagaccttgaaaaatgggtgaaatttctattcaggagtggagggagaaagaatatcttgctaaactacaaaattgtgagttccatgcatgcagacaccatacctatatttaacaaaatataggtagctgatagctctatctctggtgtcctacttggtatttcttaaagagttgatgaactagtggataaaagcctaccattcctcagcacttgagttttcacttgaaggtaattaaaggttgaagggattcttcattttcactacttgcgcttttcatttttgcttcaaagacataaaggaattgctaaagaaatgtgtattgcaaaatatcaaacaatttccaactgtgttcctcatagtctttagcatatttttgtgataattataaataatttataaaatgtctaattaacataatgtagcaataaatgtcttctttggcaagtttcactttacaaagcgagatcacaattttactcacttctgcttaaaatgagcttgtctccagttgtccacattgctatatccatcctcaatcttattcagtgtctggttcatggtagtagaattgacaccaatttgaagagtcatatatgatgtttttctctggtggtgtgattgtgattcatttttgccaacttttaaaattcaattttatcatgcacttactttgaaattaacatgtattactttcataagaagaggaaaataatgaagttgtttttctttctttcaagaggattacatacattgtacttcaataataattccatttaagcactatgcaaagttaattattgtcaaacctttaattacctatacccagttagtgaagttgctgtaatgccacttcacagaaggaaatataatgtcttacacacatgtgcacccacaggtaccccttccctttccttacccttcccagaaaccttcccctttgatttcagaattatctttctaagagatatgacaccaagatccctgtgcactaactccttgtctttcacaatatattcccagccaactcaccccactcacccctccaccacccacagtatcagcctttctcattgtacccctgctacacaggactgctgtctgctcttacacttgttcctgaactatgcctttgctctgtggaatcctctacccagaattgcctttctccctttccacctgcaggattcctactcatcttgagagcccacagatgtcaattccactacaaagccatttttaatctgcttagtcagcattaattgattctttatctgagttccccaaaactgtatgtaaacacctggtgtgcccattatgacagtttgcacacctctccactcgagtgagctcctagacagcactaggagctgtgatagacccttctgtcaytcattttatatcttgtgttaatccatgcaatatgaatttgactatggtttattaatgagttattgaatgggtctgctcttaatttaaatgcaatataatgttttcagtgtgttgacatatattaatagtaggtgcttaagaaatgtttgctgagtaattattaaaggaatggcatgggtttttatattagattcagagatggtaattgaatccctggtttggacatttggtgttgacacagtttttagatggtgccttttggttttcagtcataaaacctttagcaaccctagtagataaactccatttcccctgcattgcagaaaatctacagctgttgttttgaaatatagcacaaagataagatgattaaagcactaacatttttttcaagttctgaaactcaactttgacaccattgatgaataaaaagggaattgattacaacctaattatacatttttcaaaaaagataacacagcatttccccaagtcagatcagggtaaatctgatctgtatttgctgccttctttctaataatatctacatttattgtgagataactgattaggtttgaaataataagccacagatattgacttggagaactaggtaggcagtagctagtattagataaagctcaaaatggagttaagagccaagtggtccctgtgagaaccacaaattcttttgccttgaatatgacttctcaggacattgttggagagactgccaggatttcagaatggcctgcaggtagaaaagaagtcgtggatggtacagtccttaccagtgatgaggaacttcggtagatagtgaagggacctgatttcatccaccctttattctttaataaggtactggagttaaaagaaaagcccaaaaagcagagttgataattgcctggagactcataagtgtagtctggtttatggaattgtggcagagtgaccacatggttcatttattcatttatacattcattcaatcaataggtattttttttctggatacttattatgcctcagtccatgttataaggaaataacaaagcagtgaaccaaaaaagcccctctcaaataaatgtaaaatgtgtcacatggtgataagtagtataaagaaagaagcagcaggagaaagacaatagtgacagagaaatatatagtgggcaagaaagccatgctaataaggtgatatttgaacaaagatytaaaagaaatgagggagtaagctatgcaggcatctgaaggaagaaatgaattattctagagttttgttctactaaatgttgtctacagaccaaaagcatagatattaaatgagagccttcttagaattgtaagatctcaggtctcaacccaaccctactgaatcagaatctgcattttatcaagattccccagataacttgtatgcacattagagtttgtgaggcgttgccctaacatacttggagaccctgcaaaaattgtcacttgtcactgttgggttggactccctctacctggagaactgggcaaagtcacatgaggctgcatcactagatttgatttctggcatgtgtcacccaatgattggtcatggctcagtgsttttagcagggataggtcaaactgcaggagatctaagaagttcatgtgccattcagctctacttkgtctacccckcccatctaaataccaatatcaagcaaattcataagtcttgctagaactcctcagctagtgagacaatgaacctattcgggcttcattgcctttagttatgacctctacagcaagtgagtttagaagcagtgagttgggatgaagtaacattgattcctatcctcacagatgcctctatgaaccaagggaaagtcattaaggcttcactataaaatttgaaaatttgaatagcttaccacactttaatgcagaaactcatgtraataatctgtttcactccttttaaattgtgaggctaattcagaaggaaaactattcttttcagcaataagtgaaactctgatgttatttggggtaacmactgtcacagagcttaaaccacagttggacaccacggtgcatttctctatggggtcaaagatataatgaaagcttgacatgaatatgcaatttatcccttgaaaaatatggacaccttctgtacctgaaggttctcagaaatgaaagtacatacgccatccaagaagcatacttacaatgcaagacatatttctttctttaaatcaacatctatgtaggcttatgcatatgaatgagcagctgtggcatgttgaaacattttcccaactcacgtaactgcatcacaaatacccaggaaagatttttaaagtccagctgtggatcttgatcagaaattgcatcagaatcatcagagaacatttaagtaagctttcagaacagaaagtaccgtacacgacttggactggacaagaccagttttctrgtgcaaattccaacttaggtgagatagaagcataagtttcattacttgaaagttttgtcgctaacattacatcttttctttgcatttttaatacataaggagaaatgaatgcacgacctagttaacttgatagattctgtgtagtttaactagaatcactaagaaatagaaattaaaagttttaagaatccttaaagataatcttgtcaagtttactcatttcacatatggaggaactaaagttcagcatctagataggaaagccgtttaatattttaaaattggtatagctgttaaagctgaggctagctgagcagttagtaatttccttgatttttaaaatttactgtagtagctcatgatggggagtggctttaatagcccaaggaatggaatgcaatgagattattataatcaaatggacataaaggggtcaaaaaatttctgagggagcctcaccactttctcgggcatactgcatcactttcatttctagcatgttactgttgttaattgctattgtttctgtatcacaactgaatgatgtatacatgacagcattattgtaagtgtaggcaactattgttaatttttaaaatagccacaaatctggaaatagttatttttttcaacaagtagttcaaatatattacagtttttctctttccatcctaccttcttcgtgcacaccctttatccagccagccagccagctgcttatccattcatttatctgttatcaataagcttgtctttagtgatactctttgttgccaagtattaaatttcacctaatatgttacattaattatgttctaattaatctagttatcatattctaatttgtactgaaatattaggaaagaaacttaaataaaactttacatgactctagatttttattgcttagacatttctttctccacaactctctcccacacatgtacacattctactaacagaaaaaggcctctgccagcaactagacacttcccaggaagtctcttcacttattgtatccttttaataaccttctcctagttgcctttgtttcctccccaacctccatctaacccatagcagcgtagaatatgactaaaaagatgattcctgaacagtctgcagattcattcatgaaaggtcctttccagattccttaataattaatcatgctgcatacctctccccatgcctaacagccagtttttgacctcgagtaatataataaggacaaaagcaggtatcacttcctaactcctaaattagaaaactctcttcatctcattatctatcctgggaatggtgcatctttaactcatatcaaaggggttaaaaatatttacaaagctgattataggttaataatagatataacctcctctcattgtatgattacagttccgaacatccccataaaaactttcattccgtaataaagtatatttatctttgacagtttcatcttgtgattttatattatttgaggggtatgttgacatttagtgacataaatcagtcaytcattaatactggaaaaagccaaataratccttgtgcwagagacattttgacaacaaggagacctcttagattcacatctatcattagyaacacccagatcaaatgcatggaaataaagggttctaatactactcttgactctacaagtattacaaaatgaacacagatcttcactagataatccttcaatttgataaggaatttcagggtgttagagaactgtaaaagaatgttgcacagagatatgcaaagaggactataaagcaagacagctttaaaactttctgacttcactctatattctgggtgcccagtatagtttaccctcacatctctttgaatagctatttgtcagtcctcaactttaataatgagtaatgaggcacttttctcgtcctgtccctcactytgcaactttattgagcacrcctaagtcatatcacttttctgaacatggattccattgtttgttaattaaggtggttcaagagattagttttaaggccctttccagctgatgttctatgaagtttagtttattgtgtcttctrattaaaacatgccatcaaataacaattattacaagaaggtaatttctaaatgtttccttttttccccatacattttaaacacacagaaattatctttcacccactcggaagaaggggaaagatctgtatctgtgtaatttgctgtctctgtgtaccatgggatttgaaacattcaataatgattttaagtttaattcaagtagaagcatttattgtttcttgggggtttcaggattaacaacttactgttcatgatctttttgtttatagaaccattgtggcctaaatcttatcagtttaataaattaaattgtaattgctaaacttgcagatagattttttgaggctgaaggaaagtaatgtaaaaaatcaatttcaggacattaaagatgcagaaagctgaaatagtggagatgtcttgaactgtcagaatcacaagtagtggcagctttagggtggaaacccaagcccaagaaatagaaagtatacatctttaatgtgctttttagattcctaattcacatagaattcctgatagactcattacctaagtctttaaaagacaaaaattccaaattgcactttgtttcaagataatctcttattctcctcttagcttcctcacatttatcatgttcccattgctaaaagtaatttactttattactaaagaattgctggcacattggtaamattaagcaatggcaggacaacattcattcattcaatctttattcagctaatatttattaaattattccagtgagtgacatgctgccttgcactctggagatacaatggtgagcaaaatagacatggccccttccttccctaatggacctacagtcagccaagtaaaatcacactaacgaattatacaaagtgaatgctcaagaaaaagaagagaacttggatccaaaatcttaaagtctasgtactcaaatgtactcagagaatactaaaccagaccaaacgaagacaaacaaaagctctgacctagaggagagcgtcaagaaggcattccacgggaataatactttctttaatctgaagggtgagtaggtattgtcaaagcatagcagaaaaaggaggaagagtatttcaggagggaaagatatctgaagtgtatctgaaggagagaggatggtgcagtggagggactgaaagcaaaccagggaatgtgggagaaacactggaggaggcagaagagagaagcagagacagatcacacaggactgtgttatttctactaaaaacaatgaaaggacctttgaaaggttttaggcctgaggctggcaagatcagatttgctgttcacaaagatggctctggctgctgaatagaaagtaggccagaaagcaccgaagaggctggggtaggaccagttgaaaggcatgagtctgtgtgagagatggtgctagttggataagcatggtggcagaccagcagttcaaggatgcagtgagctatgttcacatcacagcaatccagcttgcaggacagagcaagaccctatctgtaaaaaaggtaaaataaaaaataaagagtggtggcagaataggtagagagaagtagatagattcagggaaggatgtaggtgataaaaccaatagacataaatattgacctatgaatacataaattcatcctttcctgaaaacatggaaagcatgattggctaattaaaaaattaacaaacccttcacagaaaagcatgttttattcatctttatttatttatttatttattttatttatttatttttgagacagagtctcgctctgtcacccaggctggagtgcagtggcacaatctctgctcactgcaagctccacctcctgggttcacaccattctcctgcctcagcctcccragtagctgggactacaggctcctgccaccacacctggctaattttttgtatttttagtagagacgrggtttcaccgtattagccaggatggtctcgatctcctgatcttgtgatccgcccgccttggcctcccaaggtgctgggattacaggcgtgagccactgcgcccggctattcatctttatattccttctttttccttagtacagtgtctggctaatagtaggcatttaaatgtagaccaaattgaaaaaaaaaaaaagaataatgacaatgaacttattttatataaactctgtttttactttttaaaacaatgtgtagctaaagcagagtaaaatatagatgagagaaaaagaaagatgtagagagaatgggacatggttacaagaagagaataattaaaactcgcatgtatgaagcactcactacaggcctgacacctttctaaaaatctctgcatgtgttaactcatttaaactttgcaaaaacttgtgatataggttatattcccttactcattttacagatgaggaaactgagacacagaaagcataagtggttttcccgaggttaaaaactatacagtagagtaaaacaaagtttcagtctcaggcagaaaggctccagaacaacccgtgcaccatcctgtttctcataaaaggaagaaaatataaacagattcatgctgtaataaaaggcttgaagaggaaacaaataaaatagtttggaatgggtgtggagaaaccaaaagaaaaagatgccaggagagggatatggagggacaaaatttgtcagacaaggaaatagagttaggagggttcatgctggtggagttggagagtttagcacccagttgtaaatgagaacggagtccgacagtagcggcttggagtagggcctggattaggagcagatgcgggctaggagagtatgtcttctttctctttttaaaattgttgttgttcttttgggggatatgggagtcttgggcttggctctaggaatagtttggctctaggaatagtttggccccaagctgtcataaaggcaagcagagggctcaccacttgctagctgtgagacctcaagtgagtgacaacctctctgtgccagagagtcttcaccaggaatgtaggggtaatcatatttaccttccagagttgctggaagattagtgaaaatggatgtagaatgttcagaatggagtaggccatgcgtaaatgacagctagtgtaataaccttcaacacatatttgagtgagcattgtgctgccctttgctctaatcagccctttgcaccatacttagaactatccctgagagggtcaaagagcttcacagagtttgggaagcagcagtagttaagaatttccttacttcctgctgatgggcctgaaatataggaagaaaaaaaaaagaattcctactgtgaaatcggatagatatgttcaaattccagctccaccattaacagctctgtagccttggaaaattacttcacttcttggartctcattctttatctgtaaaatgatgattcatacctatctcacaggatgactctggggattaaacgaaggcgtacatataaaatgcctggcactgtcctgacagatagtatgtcctccrtaagcgataattatcgttattatcataattatcagaaacaacagaaaccctataatgtggctattatgtggagagagagataattagacccagaggaggaatggaacttgagaaaacccttgggagactgtggatgcaggcacttacaggatgtcttcagtatcaaaactgatgtggagataacgccctgtgtggaagtttcaaataaactgtcctctgaagagtcctggggtctggcagagggatggcaggagcagggatggggagtgtaggaggagacaacctggcccctggccccagtcccactccagccagagcaatctttatttgtttttcatgtttggtcttggatacatgaagcaaggatcttaccaccaaaaaacagttttaaagctgtttatcagaaggcaagaaatgctcttcagattaaggtatttgtgtgcttaggatgaaaaaagctgtaagctcagttatttttccagtagaaagtaacctccatgagagcatcatgttttgtctgtcttgctcacagccgtgtccgaagtgcctagaggagcacccagcacagagttggcactcaatacatatttgtggaatgaacaaatgggccaaaaaaatgaccataccttgcagtttctcttcgaactatgggtaacaaagtaaattcatccccgctgaaatgcttgttgggagttctgttagttaactagagctcccaaatattgatcttcaatgcygaaaaatagccattctatgggagcagattttctttgcttccaagaatgattctgacactcctgctgaccaggttaactaaagacaaacacacactcagttttactttggttgtttggtgcatgaaagcaaaagattaagcaaacaaataaacatatttcgtaatgatcttaatagtggstttgagaatttgaaaatagagtcttggaaacattaattgaaatataaaatattagctagcacaagtataagactttgcagtttacaaagcgctctcatgtgtgtttcttattgaatctacagaacaactccaagaggtaaatatactggtggtattatcatcattgtaatttcatagataagagaagttaagctcagtgaagttaagtgactcgctcaaggtcacacaactagtaaatactatgagccaaacttgcacccagatgctctggttccatttcttgtgctctttcttcagcatcatactctaattaattttattatccaaataataactagctggagcatagaattatcaggctttccataagtttgctaatcatattttgagaaaacttatttacctgtttgatgagtgaatgcttggtggtatattaactttatttttaatgctaacataatatgtgggttcaaaaatcaaaataatattaaaatgtgtacactgagaagtcacatatcctcttcgtctccattgatcccaatttcttcttgcccctattagtagccagttaaattaatgagaaacttatctaaataaaatctgaaactaagaccatagaggaatacaggtaaatcttattggtattattttaaagaagaaaaaaacacttaacaggagaatgtgtaatggcctggggagttaaggaatgaaacattgtgatttcttagttggcttaccactgacacctgctcttcatgcctaaagatattttcccaaatcagaaataattttatagcattagatcttccttctttcctttcttccttccttcctttcttcctctctctcttttctttctttctctgtttctttctttctctttctttcttttttccttccttccctccttccttccttcttcccttccccttcccctcccccttctccttccttccttccttccttcctccctccctccctccctccttctctttttttttcttttcttttcttttcttttttattgagacagggtcttgctctctcacccaggctggagtgcagtgatgcaaactcagctcagtgcaacttccacctcccaggctcaagggatcctcccacctcagccttccaggtagctgggaccacaggtgcacatcaccatgcccagccaatttttttctatttttggtagcaacggggtttcactatgttgcccaggctggcctcaaactcctgagctcaagcgatctgcctgcctcagcctcccaaagtgctaggattacaggcatgagccaccgcacccggcctagatttttctttcaatgtgactatcataataaccaatcttctgtagattgccaagggatcacaagttacaaaagaaatctccatgcaattgtacttcattaactggtgtgattttctagaaaaaaaaatggaacacaataatctttaaagaggttactggcatctaaagggatatgaaatcaaggttaaaaccaccccattcccttggaaatatgtgcaaaaattaaccagtttcatatcatagacatcttcatataaagatatttataatccgttttcattatgcaatagtcaacgcgtaaatacctctgttgaaggtcactcagaagaactgattttataaatgattgatttcttggtaatagaaataatcataccccatttatccaaatttttaaaataatcatgcaccacaaaataatgtttaacaatggatcacatatacaacggtggtcttataagattataataccatatgtttatagtactttttatatgtttagatatacaaatacttacgktgtgttacagttgcctagagtattcagtacagtaacagtaacatgctgtacatatttgtagcgcaggaacaagaggccataccacacagcctagttgtctattaggctataccatctaggttcatgtaagtgcactctgagatgttcccgtgacaccaaaagacataatcaccattgttaagcaacacattgctgtatttttattttcttttaaacacttgaatttcctacaaaaaagaaaaagaaatatttgaatttcttaaaaataggcattcttcactgtgggagattttcccagtatgcaaaagaaggagtagtagggttttagagacaattccccactgttgtatacttagtaatgagcagcagaaacacaaagagcattctaaaagaaacacaattatctataaaattgcagacaaatagttgctttaggtaactattagtgagaaataatgaaagtagtgtgtctacactatcattatcaaaacaaagctgaaacaaactccaaagaaatgaagatgtgaagattattgggaggggtgtgggagacagaaggacgtgctgagaaaattgctgaggaaaatcaaatgttttcaacttggatagttctatttatcattaggaatgcatttttccctccttctaatagattcaagagaaaacgtttttaatagtctgctgacatatggatgtttaattttcttattgaaagcaaaaaaagtggattttcttattaatctcttatttgttcgttttgtgattgttgatgttgaaatattaaggatacattattgtaattttttctcacaatttgtattttccatctttgactttcttaactataaaccaaaaataaaaagtaaaattttacagaaagcctgagagtacagaacaagctataaagaaaatcaagtataatatctggcttttaagcataatgtatattattttataaaacaagagctggtctttagaagaaaaaaaaataagcgcacttatcaagcatttactatatgtcaggcagttttcttgggcacttttcctctaaatttatacatccaaatgtatgtcttctcttatcatcctcttctcagctatacctctccttgaatgtttactcaaatgacaccaaattgctcatccttcacccgacaggccttgatgtttcatcctctggggcttagtaattatattctgcccagaattccctttttcctttgcctacttaacacacctttactttctttttttttttaattaaagaactttttaactggtttacaaaggaggctatagactacattgaaactaatctttgtacaaaaagcaaaaaaacaaaaaaaaacaccagacaccacgagacaaaaggtaggaggaaagacaagaaaggaaggtacaaaaggagcaggaagaaacttacttagggacaagattagcatcatacaggggaaagagcaagatgagagagtatttaaaagcatttacccacacagccctggtgataatttagttggaatcaacaacaaacacagtatgacattattaagaggttttaaaaggcaacagtcatgtggacgggttattgccagtgttaagagagaaataaacttgggtttttgggcaccacagattggagcaccacccctccattccagaggacaacagacttaggaagaggaagcaggccctggggcagctgccactggaacccacctttactttcaaagaacaaggtaggcggggcacagtggctcacgcctgtaatcccagcactttgggaggccgagatgggagaatcacctgaggtcaggagttcaagaccagcctggccaacatggtgaaaccccgtctctactaaaaaatacaaaacttagccaggcgtagtggtgggcgcctgtaatcccagctacttgggaagctaaggcaggagaatagtttgaccccggaaagagaaggttgcagtgagctgagattgcgccattgcactccagcctgggcgacaagagtgaaactccatctcaaaaaaaaaaaaaaaaaaaagaagctagagtcattctcctctaggaagccttccctaaccatacactccatccccaggagaggaacactgcttcctctgtgctatctcagcatcttgtgttgttgcctttctccctcagacttgtacttcatgtaaacaagcacctgacctggccagagactatgagcttcatgggggaaaggagtgactctagtaggaagtcaataaatgtttgatgaatgattcagtcaattgatcaataaaaatttgagtgccagtaatatttttaagcctaagcatcatgaaaatgggtaggttcatgtggagaagctgatggctagtccttaaaataataaaaataaatggtgaactaacaaagccaaaggagaggttttgctctacaccatcatgaaagtccacttatgaaggaatgaactgggttcaaggattcagaaaaaaatcacaagtgaatgtagaaagaacaggtagtaactagttataatacttgttatcattatggagtgcccagtatgtctaaatatttatgtacattatgccatttaattctcacaaagcactgtaaacactgttattcccattttgtgaatgatagaataaaatcccagggaagttacacaacaattaagtagaagaggcaaaattctgataatggcctgcctgactctggtgtccatttgaaacaccatatctccaagagggggccaacagccagatcttaactgccaatctctgggtcctcacctattcctcacttctttagaaggagaaaaaggccatgctcctttaactagtatrggcgaagttcatggattttacagcactttcccttcacagcctcattaaacttatatgcatggcctcaggatctgctgagccacgttgtgctgccaagccctggggctttagaatgatgctttgctctaagagagcacttttcttaaatctggcaagttgttgcttaataaaatatacaccaactatctgagcaattgagggaagagggtagtgattatggtttaaaactggatgtwaaagaaagcagattaccaccgaagtgagaatttctgaatgtcatttggtctaaatggaactgtgattaggaaaagaaaagagacatctgaaaaagtcatgaaaagaaaaataatagcaattttgaatttcaactaaatgggtgaaatctgggggatcacaaatggaaatactttctaaagcaccctactctaaagcatctaatgtagaaggtacagatgcaacaggaaactgcatgcaacctttaaggagcaagatatttggctcgtaattaataaattctatatgaataaagttaagtcaaatgtatataaaagatgttgctgaggttataatcagtctgactttaggcagcagcaaaattttttcttttgtataagaaaaaaatcagaaaagaaaaaggctaagaaggatgagttttattgtcagtaaatgtgcattatctcgctagtcctaaatgtgagattatggatataatgggcttaattaatgagccactagaaagtaaatattcagaaaaaatcaaacttacgtcttatgaagagaggcaaagatgtttgaggacagagcagaagtcaaatgcagtgcttctgctacttggctagctgcatgaccttgtgayagttatttagcctctccaaccttcagatttctcatctgtgaaaagggactaacacctacttcatagggtaattttgatggacaagttataataataatttccggctgatagaaagtatccgggaggtattaattactaaaataatgaaaaaaaaagttaatcttgcaaagtgcctactgtatatcagatagggttctatgtattccatgtattaattaatgtaatccctaaaacaagcctgtgagataggggctatgattgtttccttttcagagatgaagaaacaaaggcacagaaaggctcaataacttgcccaagatcacacagcaaagtattagtgctgagattaaaattctggtctggctgtagcctccctgctcttgaccatcagagcctgctacctttttattgtaaaatgatagcctgttttagtttcttcacagcatttgtcaccacatataattaccatatttatttgccatggtcttccttctcccagttgaaaataagctccatgagaacaaggacctaattgaattataactgtaatcccaggtgatgggataattctctaatcaaataattattactaccatgacacacatttacctatgtaacaaatcctcacattttgcacatgtaccccagaacttaaaagtagaggggaaaatataaaataaaattttatcctaaaaaaagaacactacagaataattaatcccaaaatgtccatatcccaatacctaaaacctatgattacgtcaccttataaggcaaataggacttttcagatgtgacgaaattaaggatcttgagatgagaagtcaatcctagattatctggatgtgcctaatctaatcacaagggccttttgatagaaaaagagaggcaggagagtcagagaagaagatgttatgacagaagcagagaccagattgacagcccgagaaagactatacagggcatcgctggctttgaagacagtttcttccctggacctctaggaggaatgcagtgctgtggacagataatttattccagtgaaacctatttttgtcttctaaactctagactctcagataaatgtatgttgctgtgagctactaagaaaaaatgataataattgtatttactactggtaaataagaatgttaagaaaccataaaagatgatgagagaatcaagttagaaaaatgaaagaaaatatatgtaagaaattaagattctaagagacaatagcaaacaaaagcattgctaataatgactcagaagcattcccacaaattaacaggcagtttgttagaaaagataaccttggcaaaatacatggtacctgtattttccctcaattgctgataatataattaaaggcacacaatctcatttttcctcatttttcaaatttataagaaggaggaacacagtggaatctgcattgccatggaacacaaagaagaataccaaagataaataggcttaactcataactcattataaaaaaaaaaaaaaaaaggcaggccaggcatggtggctcacacctgtaatcccagcactttgggaggctgagatgggtggatcatgaggtcaggagatcgagaccatcctggctaacatggtgaaaccccatctgtactaaaaatacaaaaaattagccaggtgtggtggcacgtgcctgtagtcccagctacttgggaagctgaggcaggagaattgcttgaactcgggaggcagaggttgcagtgagccgagatcacgtcactgcactccagcctgggtgacagagtgagactccatctcaaaaaaaaaaaaaaaagcattcagtggaatctcccaagattagttttaatatycatattgcttctaagaagaaaatatgataatagcatttgtcaacatccaagtaactgagcaaaacacagtgtcaaggaaataaataaaatggacattgtatgctgtcaagtgtgctctcaaaatttcatgtgaatctactttttatttattatctacatctacattccagacaaacatacactatcactattgagtatatttgggtagcaattctaataccttaactttccattggtgcacaaaggcaacagttttctatctctgttcagttggagaaactcaattgtacatatattgtgcctcctatgttccagccctttgctaggcactaggaacaaagacacagctctcactctcataggctgaaaaagcaaggtctacttggctaccatgtttgtctgtctgagacatctgtctacatcttggattctaatgctgcattaaatatctaacctctgttaaaactgaaggtatgttgttagtatcataggcccaaatccagcctatggtgtacaaatggacacttttgtgatttctgttaaacgccaaccccaaatcaaaagccattttcctttctggatattaaacaacaatsaagagccagaattttgatttagaatgtatttatagtatggaattttaaaaggtaaatatttctccttttcaagacagaaactcagatatcaggattattttcagaacaaatctgctgcctctcagtattttgattaattcctctagcagtaatttcttaaagtatttgtttttaattctgtatcccatcaagatgttaattttccatcaagagttttagagaaaatgtgggcttaaaaaaattgttttaacacactgataaaataattcatttgacatatagctatgagcagttccccaggactttctttaggctatattttacaatgccaggacaaaaaagaacaaagaaagtcaaacattacttttttctaacctgggatttgagggtacaggggagatgtcattttaatactataacagaacatgtaattttaagtaaagtttttaattgtatttctaaaaacatggatcatatccaagtcaaatctagagagtgtgccggccatctctgcctgaccacacctacagggcaggcctatcagcctatcattctgcagcctgagagccgagtttgtctctcctcaagtctgggacagaccacagacatctggcttcaaaggccatagtattgtaatgactaaaatagagaacacctcctgagtgaagaaagatgcactgaaatgaagtgatcaaagcacagactctggaaccagagtcctgtgttcaaaccctaaatctgtcacttactagctgtgagaccctgggaaaggcacttcacctcttggtgtatcagtctctttattaataaaattgagataatagtagctatgttataagataattttgaagattaagtaggttaatgtttataaagctcttacaatagtgactcaatgataataaatcccaagtgttgacaggcagaaagatagagtaactcccatccaacctcaccaccacagcaaggtcagtgacatttgccttctcccttccctgcacacccctttggggcaactggcctttgtgatttccatttcttttcagcaccactcattcaaattgctttaatctgattttttggctaaatatattcattcattaaacaaccatatattgaatgtctatgatacatcagcactttgaagttccaaaagctgggagtggtagggtaggaagcttctccctcctgctgtctcacaatcattactccctccacaatcactcccaccgtgattttctcagctctgcacctgtctcaggggatctggtagccaatgcttatgtgattccagccatgcgatagtactgctgtgattttacataagctggtatgaggcatactcccattcattaagaaatggcttctctttcctaaataacccatctgtagttagaatccaccaaacagttttcagaggctcttgttcaaacaaatggccaacatgggcttacctgaaagataagttctgaaatatcttgaactggtctaaattaggtgcaatgactgttctataaatggaaccactttataagaatatgagatccggcaaaatagacaatcaatatttttaaaatgagttaataatatgacaggaccagtgagagaagaaggacagacaatattgtaggaaccattgtgcctgactagagagaaatttcaaaataaagagtgggatatgggtcctggggtaattaactttgagtytaaaatgcagctaatgtgggatacagcattatatgttatattccattttaaaaacctgcctattttaactataaggtatgatcaactgtaagatgcagccttatttcaggtatataaaaatgtggaaaaagttgccttttacaattgatgaaatatggtgatcattcacattttccttgcaactcacatggtgaacagtcacatgtggcataagtgagattggctgtgggtttttctatgcatttatgataagttcactcctttcattcctaatgaagagagcaatttgcaatgcaagcaaaagtaagaaggaagctataatagaaacaatcttgattcacactaatttattaaaaatctgttttgtgagaatgcatggacataaagaaaagaatgagacactggagtctacttgatggtggagggtgggaggagggagaggatttaaaaaaaatctattgagtattatccttattacctgggtgactaaataatctggacaccaaacccccacaacacacagtttacctatataacaagcctgcacatatacgcctaaacctaaaataaaagttaaaaaaattcttaatttcagttctttgtacataattgctaaaacgtgatgtaacagtatgtaatgcaccataggggagaactgatgtcccaagctagcaaaagggtagtatggcagccctttatagggaactttgccttcaagggtggacagggaggttgctgctcaaaaagccaacctggcagatgggaacagaaaataacaaaacaaaacaaacaactacttgcttgaaactatatcacagactctgactcagatgttcaaagcttctaagaagctgtcatataacaatttaatacttggccaggcacattggctcacgcctgtaatcccagcactttggagggccgaggcaggcagatcacgaggtcagaagatcgagaccatcctggttaacatggtgaaaccccgtctctactaaaaatacaaaaaaattagccaggcgtggcggcatgcgcctgtagtcccagctgttgagtaggctgaggcaggagaatggcatgaacccaggaggcggagcttgcagtgagccgagrtcatgccactgcagtccagcctgggtgacagagcaagactccgtctcaaaaaaaaaaaaaaaattaatacttaatctcaacacttaggtttgccattgtccttatcatgaaaattactacaattcccaaactcatggcacaaacatgtgttgacaaaatctatatacaaaatgtgaggtatagtcgacaaaatctttagaacaaaatgtgaggtgatgctagaatgtggtgacaattttgccctaacttaattggaaagccattgtaacttgaatagaatggtccacctgcagcatggtcttccctgctctgtcacatagcatcagaaaggaccagatacttgttaagaacatctttaaactgtgttgtttatgcttttgtttttgagtcagcaatcrctgacagattttagaaactggcgggaataaagaatcagacatttaatttggcagggcagtcttgtacttcagataaatggatctggatttgtgatgccttcttcaaaatattaatttctcttttgaaaccaaatcatatttggcttcaatatcttatttaaaatgcatttttacttacatatcatctkctttgagctcttaaatagcctgggagttagatcatggactttgagcttctcaaggattagaacagtgttcttctcacggtttgttggtacttgcccagcatctggtaattacaataactccctgggagattcaagggaaaatttcaagccaagtaagaactggaagggaaagacctccacatccaaataaagatacattttatttaagtaagatttgttgagttgctatgctgttgtgggatctgtgctaggtagtgagtttatgaggatgaatgatacagctcccggcctccatgtttcccatgtattagggaacacacaacagcacgttgtcaagggtgatccaatagggggaagcacagggggattagagatgtctatgtagccatttgcattcaatcagaaggagtctaggagcagttagtctaggacctgagatatgatgttgggggtaatgggaagtaggaatccaattcagacagaaatacatgcatacaaatgcaattcagacagaaataaacaacaggaacaaagcttcagagaagaatgaacagggtgcatttgtttcagagactatcattattcaatataattgtaagttgcaaattgtaattgtaaattaaggcatcaacttgggattggccaaatatcagactggcaaggaaccactaatagaactcgaagtgaattatttgtggagaatttaacataggagttatttaccaaaaagtgggccagatgtattaacacttgagaggtactccaggactattaagtatgggattgttacccctcctagacggggtgtccttgtagcaattatccaactgcagagattctcctaaggagactgcagtgaggaatccagcaaataaatgcccattctcactgtcattctgcttctcatctcctgctagtgttgtccctttgccaaacccaaccagaagccatatgtgctccatgcttatcagcttcccaggcacagatcagagtgaagaagggtggagagctgagaagccaacaagcaaaatctatacagcataaatctgaaaagaaaaatttggctaaaccttgaaaggtcttgtatcttctgctcattgtcttataccttaagacaatgaggtacattcaaagggtgttaaataagggaatatttttatagagacaacccatgatgtacttgatgtaggcagaaaggtagggcaagactagagaaacaaggaggagttagtaagctgctacagttgtctaggcaagggaccgtggtgttgaactgggaagatgccagtggaaatggaaagaagggactggatttgtgactgatctatttggagacagttttttgttgttgttgtttttgttgttgtttttctgtttctgtttttagaatagatggagatggtgggccaggagcagtggctcacacctgtaatcccagccctttgggaggccgaggcaggtggatcacctgaggtcaggagtttgagaccagcctggtcaacatggtgaaaccctatctctactaaaaataacaaaaattagccgggcgtggtggcaggcacctgtaatcccagctccaaaaaaaaaaaagaatagatggagatagtgagattagagaagaaagtgagcaggcattgaactggaagtctagaaatgagaaagaatatgtgtttaggacttggtctcagcttttgcactatgcagctaagtgatccagttgatccagcctcttttgagcctcaattttgttatctgccaataatgggaatataagctggacttcttaaattcttaaatttagtattctgttctttttcattcatcataagcctggagacaatttctgcccaccaggtgaaaggcttttaatgaactgagcatgtcaagggaacttcaggaattcacaagaagagtctgaggatattgctcagctgagggtcttttggatgttgagtttgtttattaagcaattcaactgtcagtgccttagattttaatgtaagggaatagaaggccacccatggagggaaagttagtatgtcctctctgccttctaaatatcacaaaccatattgaatattattcattttgaaatgatttaataaaacatcttcgggagcttcaagattccgttttgaatgtcctacttgtgagttttggaatctgggacagagctgagctgagctggtaattattatcaatgttgtaattattaatttgggttctggatgtcctttatagaacctataggacttctcctagtgaagaacaggaatttggcagtccatcttagctactagtataaatttttctgcagagatctttctccatttaaaaccactatgagtacaaagccctcctaggtctcatctaacgttctgtgattttgtgtcaacaggaacctctctcacagagggaagtcacttcttaaagaaacaggtagggtggtatgacagccgcatgagtgtaatttgttgaacaatgaatgcagggaggaactactctaaattaaagtcctacaatgaaaaaaaaatcaataaaaacagctggaaagcaaagacatttgctaaagccttcgaggtcacagttgtgctaattaaaagaaagcccaagggggtcaagcagattttgaaaagagcttttggatgccccccatctgaacggctgttcccttgctattcaccgcaggtacttgttctctccaaccacaattctatgctcatgcatgtgccttgatttggaatgtgccctctgccattcggctatccctgtctcacctcttattttgcaatcaactcatacaacctgcccttccaggacagctcaagtctccctcctctataaagcttccagttgctatctttctatcttctgaaccattaatgtactttacctatatagacacttatgactttttacattgtgtcatagtaatttatgtacttcttattctctcctttaaatcagaatctttctgactcattccggtgtctgaaatatattagatattcaatgtatatctcttcattgattgaatgaatgaagccatcaattaaccactcaatcagtgaaaataaataacatgtcctttgaagtgtactttctctgtggccttggaaagcatctcttttatagtttctgcttcatcaaaagttcagcagtcgtatccataaaaatattatattacaaaatggtaaatatcctaagaaattacataaatgatacaattgcaagccatattatgagtaaagaggagggtgatataatcaaaacaagaatgatcagcctagaaagtaagattgaaactgtggtatttaattatttttaagttactttttwtaactccttactatatgtcaagcactggactaagcagattgcatgcattttttcatttaatctcaaagcatgcctatgagatagttacttgtattctctttatggtacacattaggacactgagacttggcaaaactaagtaatctactctagattacccagccattaagtagcagtgctgggtttcacatacaactcatatatataacttcatttatgctgtactatgcaacraagtctcatagatttcgataaatgtgactagagaatagaagccacctattctcctatagactgcaaagatatggaaaaggaacatggctggtaagctaaaggatcaagggatccagtcccctgatggactgggttatggggagtgggtggagaggggtgcatagttctgtggggtaattggatgtgatgtggaaagacgtgtggggcctgaaaagggaccaagaaggctgaactagatcctggtggaaatgaatgggagactaaccaatagaagtggcaggtttggaagattagtctagcagaggcacacagagttgttgggtaatagagtgacttgttaggttacagaattttttattacaaccttcagagtctttctcccaagaaaagaaaagacatttacagtcagcaaaaattttatttgaatctctgtatgattacttccatataaccatttctagcctaaattctgtaataattatgtccttgacttatagttggtggacacagatgttagctttgtttgtattaaccaagtcaataggggcaacagacatggtgatcagtactcagtgcagttgttctgataccagcttttctacaggtggttataggaagtgagtaggagagaaaataagggaaatacaaaagtaggaaatgaagagaagggggtggtagttatattaaaggaactttaggcatcaaagtctgatgaggaaagggaatgtgcatgtatgagtgtgtatatgtgtgtgtgaagtcagagaagctttctaagaagccctaaaccccccttcatcaagccatctcctttaagcaaccctgagatcaagagaaggcatcaggatccctgtttctgatcaacacaaattatctaaggtctccttacctttgcccccagtctctgaaagtcttcatctattcatctcagcctctatttaaagacagtttgctttacaacatggtgggttgtccctaccattatgcattgagtggcgatcttggatcccacctctgggtcccagctcacctctttaacactttcagtgccactttaggccacaaagtagttctttgttaagtgatgactttctagctttgaaaagtttcagaatgtaaacaatgcagtctccactcagtagaacccaatttaaattgtttgaaatatataaattcactgttactcagtcagtaagaaccaaagcagtatcaaaaagcagaagagccctagctctggagtcagactgacctctgaattccaactctgtcacttactctgctgaccttgggaaagttgtttagcctttctgagcctcatttttcttcatagtgaaaatggggatcatataaattcctcaaaagtaagacacataaacaaaataatgcagacaggaaatcctagtagagaaccatatacaaactaagcactcggtgaataggacaggtgataactattatcctcataggcacacttgccacatatgcatattgtgtatgtttstttaatatacaatatatgacatgtatttctatattagtgctttatgtatctgtaatacctaagacacaatgtgacacatagtatatgctcaataaatatttgctgaacaaagctgaaaggctaactataatgggtttttctcatacaaatgttgtattttatgttaataatgaactccaagactccctaagactgctaactctatgtaataatccccagtaacagattataaagatggaaatttttctatttgtttatatattttttcaaaactgggctggattacttttatcaaatgctttctctggtataagatactgttctgttttacatgtattaccacattcgattctcacaagaatcctatgaggttattatctccttctttcagatgaggaatctgagaaataaagatgtaaggtgatctgttcaggctcacagcttgtaggaggaagacccaggactccagctaggaagtctggccttagagccaggacttgaaactactacrcttctcttcacaagttcttattgttttgtttgtttgcttttagcataaaagctatgaaaattagcaatatatctcagtcttttaaagcacagtaaaaataaatgcatttggcaatcttatatctttaccaattatataattacactaagttcatagctatttgccatctttagcacacaaaacattacataagttcacacttcagaattaaacctgtggcccaggtggttctaaaagcaggtaatgcattctggatttcactcctgtgaaataattataaattatttcataaattaattcaattaaataattatataattcaaaaagattctaatactgagggtgtggtgcctctccataatgatgccggaaactattcttttggctctagagcttataaagtaaagcaaaggattagttaagaagaattaaatataccgaggaatagacaacccaatttaatcttttgctgaagcaaaaagtrtatgcagtaggaccttgacattttcaaaattaatttgcaactatttgagtgtaactcataaggcccatagcttgtagtgatttgtaattttgttaaaggcacgtgtgggaataaacccttaactagtaagagagtctgccaaccacctaaagccaaatttcaagatatctgtattctcttaaccttaattgcgtagtaaccgccatagtcacttcctattcctcactgtctccctctttcccctttctcctagaagctgtatttcaaatggtctaaaaattgacccctgaggtttgtatggttaaccatttcatgtcctcttacatatttattacaatagcttagattcttggccagtaaattaacactatagatcataatgtgtgtccattactctatctaatcaatgactatggaatttttagggctgtggaaatcaaaacagtgttttttgagtctgggaaagtaataaaacattcctatatttaccctttgttaatgaacttaaatatactgtctagattcttacagtgtattatattaaaaatactatatgtatatgtacattcatatgagactattacattgaaatgaaaacacagtcatatctagtttttgccgtttgcttgtggacatcacccacagatttacttgagttctgataaacatatcgcaaactcgatatcagagtagaactaattttgaatagcttaaagccatttatagtcattcaagtgtataatctgtgctggaaatgtaatttaaaagatattaacttgtattctttttcattatagttacgtttattttatttcttgatttttaaaacctacatttaaaaaatattattttatttacacaatcttctttgaaataaggtaaaagtaggtaagatcttgcaacacatcagtttaccttttgaatgttaatgataggcaacattcatttaaattttctcacaacaaataaatctgacatttaaaccatgctggtatttagaagctagaaacatattctagtacttacctaaaataatattatattttcctggaggcaagttagttttcttccttgcttaaatgaaagcgattatagaaattagaataaataattataaattaaattatcactgataattacatatttttcatcctgggccatatctttgccaatattgtttctccaactaactcacatcactctctttgctttctaatgacttctttttcacatggcaaattgtttcctcctgtatcttgtgtttcagtgaaatctttgtatctcttacatgacaagcttcagcaatcacaagtaaggctcttaccctttggtcctcctgaatctctaatcatcaagtcacaggccagaaaggcaggcaccaaagtgaggaatgtaaagtgatcatgtggaatagacccctattttatttactgtcagtaaggataggagacctctaccttcttgatgcaaatgataaatgttacttttgcaatttactcactttaattagcatgatgcactgcttctccataatgggagtcctaaatataggagatttcaacataataaattaaagacaattaggcaagacagaaaccaaattcattatttgcaattctaatcctcttattggatatacttgacatttaatgcaaaataagtgctccactgccactactatttatacaatagtagatactcattaaaaagttagtgttagaaactccacccctcccccaagaaatatagggcacaattgattttaacagtttttgtttatttgtttgtttgttttttgcgggggtcaagtatttttctaagatattctgctggtagagaactaaagatcattatttggataattcaggataaatttcccccaattgtaaacccagtattttttaactaaataagctccatgtttagggcaaaagcattgtttatgtgcactggggaattggggatggggcagaggcaggatttggttgaattgttgtattactgccttttttctctatttcacttggcatgtaattcgataatttaaagctatgaaatagacactatatatatgaaatatatatgaaatatatatatgatatatatgatatatatcatatatatatgaaayatatatatgatatatatgatatatcatatatatgacatatatatgccatatcatatatattacatatatgaaatatatatatatcatatatatagtgtctatatatgaaatagacactatatatattttaaattgatatatatatcaatttaaaatatatatatatttattgatatattttatatcaattttatatatatattttaaattgatgactggcacaggagttaaataaactttaattttacttgagtatgaattttgcatttctcctggaaactccctaaataaacatctactatgctatacagtatagaggaaaacaatttggtcaaagagccatgagtggagagatctcagtttttggttttggttttttgttttattttgtttttgagagagagagccttgctgtgtcacccaggctggagtgcagtggcacaatcttggctcactgcaacctctgcctcccaggttcaagggattctcttgcctcagcctccagagtagctgggattacaggcgcctgccaccacgcccagctaattttggtatttttagtagagrtggagtttctccatgttggccaggctggtctcaaactcctaacctcaagtgatccacccgcctcagcctcccaaagtgcttggatcacaggtgtgagccaccacgcccggccatgagatctgagttttattccttattctattgctagataaataaccttggtcaaaatatttaccctttctgagtctcagttaatactacctaaaaatcatactacatttcctttgtaaattcactgtcccctcaaggactactttttmtttctcctcttaccttaaactttcagcaacactctcctcattctcattgtcagctgctgagcttcctttctacttttctgaaacaactttatttaatcaagagagaatcatctgcccatctatctgcatctgtaatttctttcctggaactgtggatgaatttcccatatttctggccaatgccttcttcgttctcatattccaggtgacattaattcagcaattcctctttgtatttggcattatcaacattttctctctattgaatcaatcccttaggagaaaactcacactgctatttctcccatcttaaaacaattaaacaatcttgctttataacaaagctcattggaaaagtgtgctttatatctccaattgctcttcttccattctcctttgaacccactctatctggcgttcatccccaccactcaccaaaatttttattctcagtgttgcaaatgatctccattgtcacttctcaattttcaattttcaccatatttctccatcagcagcatttgtcatagttgaacactcctttctcctagaagtacttgattcgcttggcttatatgattcatacttggatgattttcctcctggtttctcctggtcaattctgtgtgttttggaatggggagggaaggaagttcaccttcattgttaaaacctgtaatttggagtgtcccttggcttattcctcttttttttttttttcttttgagacagagtctcgctctgtcaaccaggctggagtgcagtggcaccatctcagctcactgcaagctccgcctcctgggttcatgccattctcctacctcagcctcatgagtagctgggactacaggagcccaccaccatgcccagctgattttttctatttttagtagagacggggtttcaccgtgttagccaggatggtctcgatctcctgacctcgtgatccacctgcctcggcctcccgaagtgctgggattacaggcgtgagccaccgcagccaggcaagtcctctcttttttatctctacctactcccttgctgatctcatgcagtgtcataattttaaatcccagctcaatgctaataattcccattgctatctgaaatctggacactggaacaactctccaaagaactccatattggtgttctagttcccatttgacttctctacttaaatgtctagtaagtatcttaaacatagcatgtccaaaattgaccttttgatcttctactttctacaaccagaaacttctacaatctttcctacctcagtggcaattccatttttccagttgctgaggccaaaaaacttgatgtcatccttaacttctccctttctctcatcttcacatttgatccataagcaaatttgatcagctacaccttagatttatatccagggcttgactatttcttagcatcctcatttttctatcctagtccatataactatcattcattacctgggttaatgcaactgactcctaatggtcaccttggttatgttctttctcccttcaatctgttgtcaacacaaatgtaagttagattatcttattcttctactctaaacttctcctatcccacccagagcaaaagccaaagtccttaatattgacctctaagctcctatatatttctctcccatttcccatttactctctgacttcgtttctagctactcttcctctactgtttctgctgtattcctactggcttcctagtgttcctctaacacactgggcacacttccagctcaggtccttgctgttctctagccaagartgttatttctgaaagtatctgcataaccacctttcttcaaactttattaaaaagttagcttccacatgagaacttttctgcctccacagtatacatatactttatatcccacttctctgctttgtattctgactktttacattgaacactatcaatatatattttacttatctaacatatttttctgtctctctcattagaagagaagttcagtgaggacagagagtttatcttgttttgctcactgttgaacctctagtgcctagtaaaatatctgatacacggggagtggtcaataaatgtttgttaaatgcataaagaaataaactaactctgtctactccatatctggactgtaagttaggaggtctataactctgggacaataagtcctaaaggtaccttttaaattattattgaaaaaataatcatatttagtgtgttctttattttttattctatatgttttgatcagtgttggaaatttaacttttttggggctctcagttttctcttgagaagactgaagtacatcagcagttttcataggcaagcatatttatttcatatatctataatgtcatggaaccatttgttcaaatggcacattatttgaaatgtctatatgtagaacagatgaaagtagagatgaatgtagggtacagcaaggagtagagcctctctctattgcttctatggcacctcagagtagagtctaaaggtaactgaactgcataattatctaatcgaaaagtcctattattctacatttggtaattcttatctcaatatttgattaaccagaagactctgctctttaactatattggatttcagtgcaattcaggtattcagaatgttaagaaaacattcctcatrcttgtcgatagtattatacgtggtcattagcctcagtcacagaataacaactaaactgccagagggacttcccatgaacaccactagaaaaacccatattctttatcctacacgacttttagccttaaatcctagggccagtgagctgcttcagatgggaatcttgggggttcctcttgatgctttaacttaagaactagagtaaagacaagcttgagcgttttttcttgtgaccccttttagtctttgtccatgagtttaccttagcattaatcagagttccccctccctaaaagtgaaaggtaacatgtatcaaattagttcataacaacctgatcctgaagaattatgtttattcaatggcacaggtggctgtaattagggcagtctttttgattagtaacagcataattcttaggaagcagagaaaacgcttcacttattttatcttatgaggtcaggctttgtggctgttctctctttgaaacaaaacttcagtgtttacaracatacccataggagacaatttgaaggtatctgccaattttccccagtgtaggtccctacatacacatttctaagaaataatcttacttcgctgtgcatagctagatgtgaaccaaaaggaactcatcagaccccctcaggatttgaaattgcatcttagagatgcatttctctctgttagtgcttaaactcaaagatggcatacagctggggtgcaggctggaaatacagctgctgggtgggggctctgtgtgcagagaaagtgggttggcagagagaaggaagagggaaactgacacaggaagaaacaagaggagacagtataaccaagagagagacaaatggcacagatcataactgaaaaactccctttattcctaggccttgtggttgctgtttctagactgtttcaaagccaggatttgcatctttttcttgggttcctagaaatgacccctgtatcctgacaaggaaattatcactttagcttgagcagtttgaatggacatctcttttatgcaataaaattatttctgaaggagacgctatcaggatgaacatcttcaaaaagaaaggcaaaaaggttgcctctctggcaactgtgacctgattctatggctctccatgctaatcatcactgccatctctcatctgtgttgtgctgctagaattccaatgtggtacctgcacaagtctagaaggacctattgcctatgatggtcaacccacaaaagccatatggggagccatgaccactaatgaactwcatactgcagctgcctcagagtcagtcaaaactgatataattgaccaaaatctatgtagaatttttcccataaaatgttagagtatgaaaaatgttttagagataaattgatcttttaaaagagtayggaaaatattatctttcatttatttcatttcaaatggcaaaaaaagcttgtaaaattgctacttctgcttttctgggaaatggaggggaacaaagtagtagagatttcattttggagctaaagtgaaaaattatcatacatttctattttctaccgccaatataaatagtgcacataaaagatacccttaaactatatactaatggacaaagatgagagttccttttctaaatgtaagcaggcattactgtgaatcagtttaaacattgtcttcttagtgaagccttccttgacccttctacctcaggcagagtcatgtttctttctgagctgaatggcattttggacatatccctgtgattgtcatgtactcactgtaatgactgtttatctctcttcttcactaaacagtgagcattttgagtaggaagtgggaccattaaacaggagggctaatacagtagaaaaagcaggcttattagagtaagagtggagtcagggaaagggaaagcttggctttatttaaactaggttgaacatgaggtgtctctgaaagttgcagatgaaaatgtccagttgattatatgcatcctgagaacagaatacaggtctaatccacagttagagatctggaactagtcaaggtgtggttgatagttagaactgtagtaatcagtgatatcgtcctgggagaacatgtcaagtgtaaagggaagaaagctaagaacagagccctcgtgaatatgtatcaagggtagaccatatttcctaaagtggtatttttcaaaccttgacagagtacatacagaatctatctaaaggaaagcagcattttatatgattaaagatggggattctcaagccagattgcctgttaaatcccaactgtaccacttacttgttgtgtgatcatgggttattaatttctataagtgcctcaatcttctccacagcacagtggagctaataacaatacctatgtcatatgattattacaaggagttagtacttaatatctggtatatagaaagctctatatgagtgtttgtaaaataaaattcaaataagaaaggaaaagaatccttgagtaaactcaggttggcttagaatttttgtttatattacttaaatatataatatatataaacagaaacttcatatgaaacatctatacttgcagcactaatacaaccataaaaactaaatatgcttataaaataaatataaagaaaattcaaaaccgggtgcggtggctcatgcctgtaatcccaacactttggaaggccaagatgtgtggatagtttgagcccaggatggatcacttgagggtggatagcttgagcccagcaacatggcgaaaccccatctctacaaaaatacacaagtaattagcaaggtgtgttggcgtccacctgtagtcccagctactggaaaggctgaggtgggaggatggcttgagcctgggaggcggttgcagtgagccagaattgtaccactgcactccagcctaagtgacagagccagaccctgtcaaaaaagagagagagagagagagacaggaaggaaggcaggaaggaaggcaggaaggaaggcaggaaggaaggaaggaaggaaggaaggaaggaaggaaggaaggaaggaaggaagattttaaagcaaattaaaatcaaacttacaatattaatttaatgtaattgcttatgttattctaccaaaactacataacagttctccacatgaagtatgatactggctgcaggtaattttgagtttgatatacttctactttcatgtgctatgttatgactcactccaacctcccaccacttctcctcatttgtataatattccaaggtactgtttaaggttattatatgtccatcaattttcttttcttcttggctcaagaaaattaaatcagtaccatttggtattgacgcattcatacatacaaaggtaagagataagaaatcttatggtactgcttggttttagggcaggcacccagatgatctaaaatgtgtttatattattgttcaagataatcatgaaaatgcaaacagaagcttaatcttcttgtgaagaacttatggaccttagtaatatgtcacctaattccaatctaagaaataaagttataaggagctgctttgaaagaaaaactgaagggagtgtagtattacaaactttttttttattatactttaagttctagggtacatgtgcacaacgtgcaggtttkttacatatgtatacatgtgccattttggtgtgctgcacccagtaactcgtcatttacattaggtatatctcctaatgctatccctccccgctccccccaccccacaacaggccctgatgtgtgatgttccccttcctgtgtccatgtgttctcattgttcaattcccacctataagtgagaacgtgcggtgtttggttttttgtccttgcaatggtttgctgagaatgatggtttccagcttcatccatgtccctacaaaggacatgaactcatcatttttgatggctgcatagtattccatggtgtatatgtgccacattttcctaatccagtctatcattgttggacatttgagttggttccaagtctttgctattgtgaatagtgccgcaataaacatacgtgtgcatatgtctttatagcagcatgatttataatcctttgggtatatacctagtaatgggatggctgggtcaaatggtatttctagttctagatccctggggaatcgccacactgtcttccacaatggttgaactagtttatagtcccaccaacagtgtaaaagtgttcctatttctccacatcctctccagcacctgttgtttcctgactttttaatgatggccatcctaactggtgtgagatggtaactcattgtgattttgatttgcatttctctgatgaacgtgatggtgagcattttttcatgtgtctgttggctgcataaatgtcttcttttgagaagtgtctgttcatatcctttgtccactttttgatggagttgtttttttcttctaaatttgtttgagttctttgtagattctggatattagccctttgtcagatgagtagattgcaaaaatttttttttttttaaggcagcgtctcactctgacacccaggctggagtgcagtggcatgatcttggctcactgcaacctctgcctcctgggttcaagcagttctcctatctcagcatcctgagtagctgggactacaggtgcatgccaccacgccaggctaatttttatatttttagtagagacggggtttcaccatattggccaggctggtctcgaactcctgaccttgtgatccatctgcctcagcctctcaaagcgctgggattacagccactgtgcycagctacaggcttttaagaaaggaaagacttgagtatatttaattgttgaggggaaggagctaggacagaggaagaagttggagataaaatgaaagagtaaaggaataattgagagagtaaaatcttgaaagagacagggaggttttgaaatcaaaaacagaggtggaaggattagagtagaacagaagaaagctaaatcaatgcaattttataaatttagttcaaggatagtgttgcatagttttctaatttttttcaaactttggccacttcttgctgtataaagaacacaaccaacaaaatttgttttcacagcatttggccaggtttttattctacagaatgcatcacaaacactgagaatatatgaggggtttaaatcctrtaaaaagaacctcaggatgagcagatgagttgatcgcgatgcatgggaaccaatcatgagtgtcagtatccagagtttgagaactgagattcgtatttttggttgctttcgctaattgctgatgacaggtatgagtattgcagcatcctaagaagacagctggcttggagccacgctggattaaactgstaagtatggaaagtgaattatttttccctcaacatgaaaggttctggaaattaatcattttacttcataacaaaatctgatgactacagggcaggtctgggcagctaacttaacacagttttagcttctgtgtaggtagaataaaaaacttcctgaaacccttgtttataccaaagccttgtgccaagcaggtgtcctagactcccagaagtggtgaatcataaacattcatgaggcattttctgtgtcagtattttcagctatgaaattgaagtggtaacggatccaaacactraaagactgctgaggatttccagaattctgaaagcagatgatctctgggtgaggactaaattgtctgttttctagaacatactgtaaatcactctctggtatgtggctacgtaaagtgaatatatgtaagtgtaggtccttaataacaaagggtggtgatgttgactttcatatttaatatgggaaatgagttcacagatttgccaaaaagcaataccttataatttatattcctatagtgcagtacttggtttgtatctctgccctgtacttatgtgtaggaccacaggtcaccatatgatttaatcagagtgcatatgggaaatagaaactatcctatgtagtttaagaagaaagaaatttaattcagggaattaagtgtttgtagtattgctgaataattgaaggagtgggaattaggaggcagctgctggatcaaagtcaagaacacactgcaatacttgaaatctagagagaaggggaaaaggattagaaagcagttatattatccactaccacagaactgcctctcaacattcaattctggataagcttggttgacagtagaaagataacaggaagatggtctctctcttacttcagctttcacatccagttagggcatctaaccgtggaaacccaatttgcattgtgaaccctagctgcaagggagtctgagaaatgtagtttttcattttccagcctctgtagtcaggaaatcccatagaaagaagtaggaatagatgctgaagacccattgacatacccagtacgtaataaatatagccaacctttattgaacattcactgccctttacctgttttcattygtgtaatccccatagcaaccctctgaggtgcatgctattttttgtctacaatttatagatgagaaaactgaagcactgagaagatgaagtagcctgtccatggctaggagcagtcactcatgcctgtaatctccccacattgggaggatgaggcaggcagatttcttgagctcaggagtttaagaccagcctgggcaacatagtgaaatgccatctctacagaaaatgcmaaaattagctgggtgtgttggcatgcacctgtagtctcagctacttgggggactgaggtgggaggatcccttaaacccaggaagtcgaaattgtagtgtgaactgtgtttacatcactgtactccaacctgggtgacaaagtgagaccctgtcatwaaaaaaaaaaaaaaaaaaatggcctgcccactgttatgtacattgtaagtgaaagagagagaaagagacagagatataaagtagggtgcttagggcatagaaaaagaagacaatggattgaagagatatttctgcagtaaaactgacaggatttcatgacctcttagatgcaggggttaggaaaaaggaagagacaagggtgctagaagttactggtttagaagactatggagggtagtcccattagcagagatgaataaaaccacctcttctgctcagtcaagcttccttttaaaacatgaattgtagagctaaatgtagggcctacctatgacctggcctaagaagattaccctagtcttggttggatagatccatttctttttagtcattattaatgcagccaaagatagaattattgactaacattaagttgatggttacagaaacccacaaagtcatattttactttgtttgtgttcctgtgttgtctttctcactaggctatatggtactttaaagcagcaatagagatgtcttcatttacttctaacttctgggtgtctaatgccataactatatgttaaatttaattgaatgaattttatggtccaatggtagattagggccagataatgaggaaactttaatctcaagacagaaaaattctaattctaattctactgtaaaaatgacaatatggaccaggatgaaaggtattttgggaaggtttgaaatgtagtgtgtgcccagtaaatactactgcttcattaacatcaggagtatcatacagaaagtaagtacatactgttaaaactagaaggaatccagagttgagctaattcaatcccttcaaaagaggaaataaagagccagagaaggagagtgaccatgaaagatcacacagccagaaagtgcagaggtgggtgcaaagtcaaggactcctgaatcttggtagcattatttctgctaacacaaatgatagaagtctgtgactatggaaaattaaccttctcctgctaataactaatttttccatagattttttttccttagagtactatttatttttctcttttaaagttttaaaaaaactatatatatttaaggtacacaacattatgttttgatatttcatatacatagttatgatattattactacagtcagtcaaattaacatagccatcatctaacagttacgtctgtgtgtgtgtgtgtgtgtgtgtgtgtgtgtgttaaaagtgtggtaaaatttactctcttagcaaatttccattatacaatacaatatttccctaaaatttgaaacccatttgtttattcagaaaacgtttgtgaagtttctagtattctagctggtctgaagcactgggataaagagataaaaaggcacatactccttgtgcccaagaaatcaccagtcttctgggagacagcattctcagtcttttggttgagcttccaaaatacagtgtgagttttcagggaagagttccagtgtgtctgtctagaatgtcagggaaaggttctcagcctcccaagtagctggaactacaggcacccaccaccacgccttgctaattttttgcattttttttttttagtagagacagggtttcaccaagttaaccaggatggtctctttctcctgatctcatgatccacctgcctcggcctcccaaagtggtgggattacaggcatgacccactgcacccagccagtatggccatttttataatattgattgttctaatccatgagcatgaaatattttttcatttatttgtgttgcctttgatttctttcagagatgttttattgttctccttctagagatatttcacctccttgattagctgtattattaggtattccgttttctttgtggctattatatgtgggattgtgttcatgatattactgttagccatgatgttgttggtatatagaaatgctacagattttttaatattaattttgtatcctgaaactttactaaagtcatttctcaattctaggagccttttggtagagtctttaggattttcttggtatagaatcatatcatcagcaaagagtgatagttttatttcttcttttcctatttgggtaccttttatttctttctcttccctgattgtcctggctagaacttccagtactatgttgaataggagtggtgagagtgggcatccttgtcttgttccagttctaaagtggaatggtccaagattttggtcattcaatatgataatggctgtgggtttgtcataaatgtctcttattatattgaggttatgttccttcagtgcctagtctgttaagggtttttatcagtgaagggaatttggattttatcaaaagctttttctgcatctattaagatgatcatatgtttttttgcttttgattctgtttatgtggtgaatcacattgatttgggtatgttgaaccaaacttgcctcgcaggaaaatgcctacttgatcacggtaaattaactttttgatgttctgctagatttgatttgctagtattttgttgaggatttttgtgcaggacaaaaattctgtccccatgtgttttagtatgcagagaggtaaaacacaagtcactgggggcatggcaaaagcatacagcaatgaaaacttttccaaactcttttcttcacagtgctccctccatggcacaagtgttttcaaaaagcagtaactttttcactcattgctaatatatcrtctttactttgtatcaggagagacagagaaagtatatttatttttactgttttcataaaatttgtattgatagcatatagacaggaaaatgcacaaatcagaagtatacagcttatgctaatacatagtgaagatacctacgtgatcaccactcagatgaggagagaaaacaatgcttctttgtacttctcccagaagtactgcctccttctgaagagtaactgctatcctaactcctaatgtctttgattagtttttatccagttggcactttaaataaatataatcatatagtatataatcttttgtgtctggtttcttaaactcagcttgatgcttgtgaagatcatccatgtcattggatataggtgtagttcattcatttttrgtgttgtatagtattccagtgtataaaataccacaattcacatatccgttctattgttaatggacatttaggctgtttctgtacttaactattattaacaatgctgcactgagtatttttgtgcatgtcctttggaacaaaggtgtatatataggagcaaaattgctggaatgtagagtatgtattagtttagctttaggagcaactgcttaatagttttgcaaagtgaagatgaatttacttccacattagtttttcttttgcattgtgctctgtgctgtctttgtgctctgtactaaaagggatagaattctgtcatcagctatcactaaacttgtcatcaccttcctcattcctctaaaatttgctctcctcagaggttctccatccacccagatgcttgggcatcatatcctaattaccaagtgtcgtcaagcctacttcctacatacctctcatgttcaccagctcctctccagctgcactgtgatgagtccatgagaatccaaggaactccatactgtggtgtaccctgaggtccctagccagtctgctaccttctgtctacctttcagtcttcctgtgtttgttttctaaataacatgtaagatttttagctgtaattagagggaggaatgggggaaaataagcttactttatcttctgggaaatctcattttggtttaatttgcatttctctgatgaataatgaggttgaggctgaactctttttttatatatttttcagctatttgaatatcttctactgtgaattgcctgatcaaatctctcggtcattttttctattgagttatctttctttttccttactgattaatatcacagaagtattatatgatttaaggctccaatgcatatttttctttatgtcttgagtatgcttaatgttctttttaattatctgctaagtaacatgtttctgttaacaatttatccatagaaacgattagtagaatttagaggcttatgaaaaataaaaatgcataatttattattaacacctctttttaagtactttgacaccagtgaagttctgcatagcacaaaagattcttatggccacttttcagattattacaaaatactgtaaagattctgtgattcaaattatcttaacccatcagtggtgggtccagttaagataatttgaatcatagaattcaaatgggggcacagtgaagcccttcagctttgtgaatgtctctctttcctcaagatgcctacaatccttaaaaaaagagagaagaactaatacaaggagaaaacaatcatataaataataaaataatataaatagamccatttgaaccatcatgcacacttaactgagctctgcttatcccccagcactttggacttcactgtcaccaacagtaggcaacatttaaaagatgttgagcaggatttgtgtgttaaaagttcaccttgatggcagaagatggataggaataaagcaagacagttactttcatggtccagatggsagacaacaaggacccatcatcatgcagctatgatgggagaggagctggtgaatatgagaggtgtgtaggaagtcggcttgmcaacacttggtaattaggatatgatgcctaggatttgggtggatggagaatctctgagtagagcaaattttagagaaatgaggaagattatgacaactttggtgatagttggtgacttagaattctgtcccttattgtacagagcacagcttctccgtctgactgtatctcctgctgttttgaggcagaggaaattggaactaaattcaaattatttcgaagcttttctccctaatgtatttatcaaatcacagcccgctcagctgagtgtgctagacaggtacatttcatttggacaataatgccagtggtttgctagtgactagtgtgtgtctttggggagcagcccccaaagagaagcctgcccctctttttcaacataagaactagaaaaaaaaaatcttggctgtgtactgcacatcatattatctccagaagcctaaattggtaaatgtcagcattactgtggacagtgagtggttgctgatgtgggtttgggtaaacattgtaatggtggctggttgtagataaagagcagcagtttataatttgtgatggtgcatgtttaactccccctggaaaacacagacccttggaatctgaacttgttctaaacctccttttctcacagaaggatcaggaggaagagaattggcatcatcactaaccctgtttcataagctatccaatgccatcctctcatctcttaattgtttccctctggggttcctctctgaatatggatctgagaggagagggaggagagcaagggggcacaggtattaaagagaagaagaagaaaagaagattatgtaaggcagcatcaccaaaagaataagtggagaagacaggaaaattgcaagtacagaagaaaacctcaggaaccagttcaactaacccttttacaggcacccaccaccacactcagctaattttttctatttttagtagaattggggtttcacagtgttaaccaagatggtctcgatctcctgacctcgttatccacctgccttggcctcccaaagtgctgggattacaggcgtgagccaccacacccggcctatttattgtttcttaattattcatttaacaattatctagagttaactatggaccaagcatatagttctatttgctatccttttccaatctgtgtttataatcgtatggactttgatgtgccttgccaccgaatatatttgagatgtgttttaagtagaaacatatctttcagattcagcagaaatggagaaaaagtatagctccaagagagcatgaaaatgtatgccattaattaaagcataattttaaaaaatagaaccaatcaatatgaaagttcatttctcaacatactttatctttttttgtctgattaattgcttttctcctccactcactttttctttatgagaatgtttgttttcagtaggacattatgagaatgtagtgaaaaagtaattctaaaaataattcatctgataaaagagttgtattaactttattacagcttcacacctaaaatctgggaggtaaataatcttttgcagcatcacagtagcatctgtcttctaaacccttttgttctaagtcccattccaaacaggtacagcttccatggtatgatttgtttgcttttatccaaacaggtgtggtttttggggctctacagtgtggcctatggcttaattacaaaatgagatttttgtatacatagtttatttcacctaataaaatgatacttgtagttggaatattttgcttttcagattgtgtagatatcttggaattgtaccacccacagtgtcccaaattctgtcatgcacagatgctcagtaaactgaacactgccatctatagagaagtaattagccagcatcaggtttcattggaatcactttgctgcactctgattcacccttaaattattgtcttcactgtgcattatgagctgatcaaagctgttcttcaagtttggatgctttttttttcttcttcttcttattctttagggcaatgctctagagaagaaacaggcactttagagagcaactacattttcaaaaatagatgaaattaaaacagagcaacaaatcatacacacagttgatttctgttgctaggatgttttggcctctgttttatttattaaccagcgctgtcagcagagaaaaataggacttttgagacaaccattgtaaacaataaagccaaatgtcagtcaaacaaataaatagccaatcttgccaagaaaagacattgcagaatctctgtatctttctcttttttttttgtatctaaaaaatgcatttcagaacaggtgcataaagttgccctaacttggtcaggccatctggctaattagtatgtatgttgagttctagtaataataatattaaaagcaaacacttgtgtaatacccttttcccctatgaggacactgagagacagagaagctaagtaatctaatctgctcagggacacatgaccaatcagtttaagacttgggtcttgaacctgagcggtttggctcaagtcttaaaaaatatgccctcttaacaaatatactatcatgctcctcatgtgaaaagcaaaacctcagagtggcataggcagagttattaaaataaaatgatttaggttgaactgtatgaaaaatgtcaatatttgacagtttgtgacctaacagatctgtagttttatactgtccaatctaatcgcaactaaagcaactaagcacacatttatgaggcctctgctctgggtcaggccctgttttctggatgttgctggagttagtatgatttggtggcagagagtgaatctggagactggaattttccaagtsccattgctaattttgattagtcagttcatttccctggacctgtcttttcatctgttaaataagcagatctcaaacttttcagactgtagttcacttagaaagggtgaaccatcttatgtctcattcattccaatcactctcaatttccagtggtaaacagaaccgctggttagaaagaatgtgactataaaagcaaaatgtacgtgtgggaagaattatgtttgcatatgctttagcaataggaatacagatgatttaagtgtccatatgtcttaaagcctaattattacaaaatattaggccaaaatatagtcagagtgcaaattatgtgtcaccaagagttaacaaaattatctgcaacaaatagaagggataatggtaaacctaaattaaatttatcattaaaagtaggaatagtaggatttaacaactatgaccaattaaagaaaacactgaggattcagtggctttttaaaaagcatcttgcccccaaactgggaggattccacctctctgcctgtgcagtagaagctgtgtgacctagtcttcctggtataataccaaattaaatccttaatcaattttactaaaacactaatttaaatatcaaatcaataatccttaacaattcactcagtgctggttacattttaaaatacgtacctatgaaattacaagtgatttaccttaaaaggccaaagaaaaacttatgtggcatgattgtgatgccctcaccttccatcctaaccctctctaatcggccaatattaatatcaaatgttaaaaaaakaattatatttattttaaaacagaggacacacatacacaragccaccacttatgtcaatacagtttaacccctacacaaaggtgacaagacaaacaggtgagtagaggctaatacctataacaagttctgcacaatctgtgtggggcgccttgtttgtgtgtggtgtacgacaaatatgtataaaatgtgtattttatacatatgtrtatatatataatattaatgtatatataacgatacataggcacacataattaaacaattgacataaatgtttcatgaaataatactcttactgtgtgcattatcctctgaagtttctattttattttttaaagaaaactatgggctgggtacagtggcttatgcctataatcccagcactttgggagtccaaggcaagaagatcacatgaggtcatgagttcaagatgagcctagccaacgtggtgaaaccccatctctactaaaatacaaaaaaatagcctggcattgtagcctgtgcctgtagtcccagctactcgggaggctgaggaagaagaatcgcttgaacctgtgaggcagaggttgcagtgagccaagatagtgccactgcactccagcctgggtgacacagcaaggctacatctgaaagaaaggaaagagagagagagacagagagagaaaggaaggagggagggaaggagggagggaaggaaggaaggaaggaaggaaggaaggaaggaaggaaggaaggaaggaaggaaggaaggaaggaagggaaaattagtgatcataaattgatttgatttcacaatccacttttgggttgtgatttgcaatttggaaagcatacttttaaagaaggttactcagatatgccagatatgagttcaccgtgacctctatgaatagtgtgggcaacaaatgattgggtaaagaaaatgtgatacatatagagagatgtagagatatttctgtctatagataaatatagatatggaatattagccaaaaaagaatgaaatcatgtcttttacaacaatatggttgcaactggaagccattgtgttaagtgaaataacttagaaagtcaactaccacatgttctcactgataagtaggagctaaataatgtgtgcatgtggacatacagagtggaatagtagacactggagacttgggagggtgggagggtaggagagggatgaggaatgagaaattacttaataggtacaatattcactatttgggtgatggttacactaaaagcccagacttctccacttcacaatatatccatgtaacaaaactgcacgtgtatcctcctaaatccatttaaagcaacaacaacaaagaaacaaatgagcaaaggcacatttggaaatttcttagatgaagggatttgaagttgattgctagaactgggcatagttagcctgggctagagacaagtgatgattgtagagaggaggaagaagccagaagagtaagtctcagtcctccaatatttgagcagctaccgaagtaacaagacattagagggactaagcatttcttcctgtggctcccagggatggattttcactcattcagccacctgagcactatttaacaccagctacttgccagcttctgtgctagagactgaaaatcaaataccaaatacattagttaatctttatgcaaagaaaccctgctttttcagtgatgtgataggtcaacatgcctgatacgatatgcagtatggagagattttgttaagtcctagtgagtggttttattagtgactcacagagctcctcatttaccagggttgccatttgactcaatttctttttccttttytctttccttttttttttttttttttttttttgagatggggtctccctccattgcccaggctggagtgcagtggcatgatctcagctccctgcaacctctgcctcccaagttcaagtgattctcctgcctcagcctcccgagtagctgggattacgagcacccaccaccatgcccagtaatttttgtatttttagcagagatggggtttcaccatgttggccaggctggtctcgaactcctgacctcaagtgatctgcctgcctcagcctccgaaagtgctgggattacaggcgtgagccgtcgcrcccagccattgagtcaatttctaaatacttctgagtgttcactactgtgcagaaagtggttcagttatggagaagcagatgtcctcagaaggtgagctatgagctttctacctcagcgaaagtgtttcccagtgcttccttcccccattcccctccccagttggagcatgaaactatgaaagagcttccatctgaactttaaaggagccattttagaattctagctttagacattttttcttgagaaaaatcattaagctttccttttattttagattgtttaatttgcaggaaagcacacatgataatgaatacataaatcttctcaaatacccacaaagcctgcataatgaattcttggttttatacgctttgggctcttaccaatttcttttaaattccaaaataaatccattagaagttgtgatccccatcatttcactacacggaaaattcactgttaaagcttgtttagggttatctgtgagtttattatcaacatgttgaagttacagaaagacatattttggttccatataaaactaaatttctaagcataatagctaccttggtaggtattaagctccccaacatgagagacatttaagaatagttgaaggtcacctggcatctggttggagtaaggggagaatgttacccaaaattaccctttagcttcctaccacccttgagattgtatgttttaattaaataattaatttaattatttctccagcccacaaccgagttttttccctaaaacagcttcctatacgtgctttctggaatcacatccaaaaacacaaaatggctttctctttaaatgaacaygtctttaacatactaactagatcgaaattaatcagtaagtacatttcagtcagtctcttctgacaatatagccatggctcagcaaaatcaaattattagtaataataattatgaataataccaaatagtaacaaagcactagtaacattgacaattgttcttaagttgctaacatttatttaaatgactattgtgtggcaaatgctgtactaagtgctttaaaggtactaatttaatgataaccctttctggtggtatagctcttattttcatttaacagataagaaaactgaggcaggcagccagaatggagattatcaaaaagtcaagaaacaatagatgctggcgaggctgtggagaaataggaatgcttttacactgttggtgggaatgtcaattatttcaaccattgtggaagacagtgtggtgatttctcaaggatctagaaccagaaatatcatttgacccagcaatcccattactgagtatatacccaaaggaatataaatcattctactgcaaagacatatgcacatgtgtgtttattgcatcactatttccaatagcaaagacatgggaccaacccagatgcctatctatgatagactggataaagaaatgtggtacgtatacaccatggaatactatgcacccataaaaaaggaatgaaatcatgttctttgcagggacatggatgaagctggaagccaccatcctcagcaaactaacacaggaacagaaaattaaacactacgtgttctcactcataagtgggacctatacaacaagaacacatggacacagggaggggaacaacacacaccagggccagtcaggggctggggggagaggggagggagagcattaggacaaatagctaatgcatgaggggcttaaaacctagatgatgggttgctaggtacagcaaaacaccatggcacatgtatacctatgtagcaaaccttcacattctgcacttgtttctctgaacttacaaaagaaaaaaagaaagagaactgaggtagggaaattacataacgcagagggccacttggaaatagcagaaccaggacttaatgccgatgagtatactaactcaacagaataaactcataaccactagcctatctataaaatgagctttatttagatgtttttgacccttgctaatttctgtttcatcatctaaaatttagggacctagtaaggcccccttattggaaataatcatgctgagaaaggaagaatgacccctataggttcttagttggaacagacccctggtttcatatacacatgggcgacaaccagggcatgagtaattctcaaagaagtgactttgaaattcagcttatgtaacatcttcaacgagaaacagcaaatttttagagaagtgacaagatgaaggaaaaggactttgagtctcttcaggcacagcgagcagtttgtaggaagccaaataaatggcagataaaggctacttagtaaagcttgttaatgtagattctcctggtaccatgaccaggctgatgagggtccaaagttgtgttcagtggttaacctttgctctccctggtagaaaagcagggatggggggagaatacctttgtctttgtaaatctatgtgctgcttttaggaaaatggagggcagagagttttcccacatctgcttcttcttgattgtctttagctcagtaattctttatattttggggaggcatattccggtctcccacaatcatatacattatagcttaagtatatgttcttaaaatttgaaatattgtattataaattttcaacaagtggaaatggttaagtaatttacaaggtatctactcagtgaaattttaaggagttattaaaatgtttctgacaaagaggtattaacaggaaaatgtgtgcaattatagcagatgaaacagtaaagtgaacatttttttgatatagtgtgaccttaacattgtaaaaaaaaaaaaaaaaaaaaaccataaaaaaacacctagaaggaaatgacaaatatactcacaatgattgaccctgagtagcaatatctattttgttctaatatcttttctttaaaaatctcttgtatttttacttagtaaactccaattgtttctacaattaaaaaaagtttgttttgttttatttttggttctataaagcggtttacttttctgatacaagtgacttggtttctgatctgacgttattgtgtataaagtatcatgctttcatgctcactcttcttaaatgaagatatattttaatggtcatatgttcatttagcaataaatgaatctgtatagaaatgggcaactcagattcactataaaacattcaattattaagatgcacaaagactgccaattcaactttgcccagactggagtctaatgtatagaatctccactgaatttactgccaccttcatcaattccaccgaattgactgctgcagaattttatctgcagccctgcgaactatgatcctgtatttttcagctcacagagaatggtgaaggctggtccagctggtttgaagaacttaatgcaaggtgatgtgatttatagtccattttggaaggtcctccacatgtgtactatctccaggctcatgatttaagtacccagctgaggaagagtaattcctgtattattagacttgattaacctgaggaagcttggagtgcttcattttcaggaaggctcgggctgtcccacacggagattgtatgcttgaaatatgcttttgaaaaactctacctttgtttttcattcagtaactgtcacaagtaccacaggaaacttctgcctaataaggtccacttcccttccttagctttagatttgaatgaaagatgtccaccccaccattaaatgttgtatttagagtcatttgcagaataacttayaatattatccttagtggcaatgaacgtccaaacatcagaatttaaacctttaactttgcctgttaagcagttgataaataagaaatatatactttacagacttacacatgtctttcctgggtgggactttttcttacctagcattgtctaaaataatttattaagatatcttcacagtagcatatcttggaacttacctagtggaagtaacaatgcttataatcatgcctgcattgtagaaggaaagaattttaaaaagaaaaaagaaagaaaaataaaacaggacaacaatattctaccaaccttaatttattcctgggcaagacaactgtgtatcacggttttgcaaacactggcataagtgctgttaaatccctgttcagttgtaagttaaagtgcagggaccaaatggattcccaggaactgaacctatttcaaggaggaaggccctgtgatttaggcctaagacaagagtgttgctggcatgacattgctgaaagcaggggaagaatgactccttgccccagaactgcttagatgtgtccgggatttgtgcaaagtcctttgtgagttattcaaaccaggccatcagaaatgctatgttgggtcataccagtggaaccttcagccaagcaaggatccaaaacattgcaggatagtgtgagaaatgctggaataacaggcatataggaaatgctatgggaatagtgggttggtcattatctcagtctgtgaggtttggaaggattcccagaggcagcagtgtttgagtgtgttttagaagaatgaataaagtgagtgtacaaaaaagaagaaagagctgtctgtataaagtcaccaagttttctaggaagaagatggtgagaagagaggctattagggaagcaaaattgtgaaggtgtcatgtgctttactaaaaacatgggctttgcgctttagttgatggggagtcagcaatggatttgaacagagaagagacaagatcaggtgagcattttagaaggagtcctctgactgctggtgtggctaatgcactaagggaacgtgacataagagggaaggagcaagtttggagagagtagcattcatgacagtggcagtggcaacagagggacatacagagtagagagacattttggaggtaagattaatgggatttggtgcctgattagatgtggaggtttgaggctgaagattctagttcatatcactacaattgtgataccactaaccaaagactttatgccctgtaaaatccatgaatttggctgaactctccaatctatagtatgacttcagctgtataatagttctgtggcctttaaaatttgaactaaacttttaactttacagagaacttccttttgtttgatctcactaaatttatagtttgatagatgaaaaagccaagtgaaaataatctgactaaaatcaccgaagtggatttttcggaggttggactagaaccaagtctccatgttccctagtcttaaactttaaatcaaataacaaatctgatagctttgcactccatccactccacccattttatattttacatggactatattaaaattggagagacttttgaacagaataggaagcagggagctttggaaaagtcacaaagaaatcctgggaacttttgggaaggaagaggtgtccagtagaaggcaaaggggagccaagtaataatgactcttccaggctttccagatgtcaatatttgcattactcacagtccaagggcacctgttgcacctgaatccactgagttttccctataaacctctcccctgtgcaccacattagccttgggtggtggggagtggaaggtggagagggaccagctgataatggctgtgaacaacaatcactgtggcctctacataggacagactctggaaccctgggtccctcaagtctcctgtctgtttaagaggtcccttacaacttacttatcggcatcaccctcaaaatctgtccctaggcaatctcaaccagggaatgagtggactgttgattgtgttgaataaaattatctatgtagactatgtagaggctatgaaaataagcttgttcagtttgaaaagtgataggagctgctcttatattgttaaaacaacactgaatctcaacctcagtgagcagaggaattggagagtcctgatccctgaaaaccagaagttctctactagaagtagtagaatcattttgcaatggtgggagaatcattttcaattattttttatccgtggtggtgattgggaagaggtaagacacctgtcttagatgcaacagrcatttgtgggcaggaagagagtgttcatctgaaggggtcattattgtctttctaggagccaaaaggggcatgctatcaggatgcctgcagagaaacggaaagtcttcatgatactcctcaaagcactgtttgtttgtttgtttgtttgtttgtttgtttgtttgttttcaggcagatctgatgtctctcagggtctgcaataactgacttgctgtcaagattagcttccacttgtggctgacctrtttggcaatggtcaaatacctgtgtctaacagagagatggtctacaggtctacacttgtgcagcccttatcttttggggggatttgattgaatacctgccttcctgcctggctcagtgactcatctgatttcccatacctccttgtcatttagacgtatgattggcagactcaataaccaatcataaaataaatgagcaaaatactgctttgaaagaaagttctttttaaaaaacttttctcctaatatttttgtgtggggagggaaggaaattcatatagaaaaatacaatcccaagctcgtaggtgtggtttaaacagaccttgtttagttttatgatttaacctaaaaccctggagacttccacagctttcaatcccatcgagggaagccctttgtcaagattagttagaaatgttagtgttaaccccattttatccctaaaaaacacttttaaaatgtttttagtctccaagcaatgagcagattcaacttttcagtgctgttttcctagtgatcatttgtttctgatgaatacattcacagctgattttttttaaaaaataaaacatttacacttagatgactttgcatctcaggtgagcttgattgactcctatttgagggacttttttttccctcatagggttttttagcctgtgcactgctctttaagtgttataaagtgaaataacagggaaaaatgagtgggtggttaccatggtgaccaccacagctgatttgggtagcagtagaccgtgctgggaaatagtgccttgttaaaccgaactgcagtgataatattgagagggaaagtgaaaatgtctgagctccrcttaatcaaatgaccaaccattaaaacatgaatatcaacatctgtgctttggcttcaaatgcatatatagcacacatcaaaacaaaagtccttaagcgtacctggaaaatggttttaggaaggaatctaaatcgtcctggtttccaagttttagctattcatcctaaaatattaagaaaagctttaactaacaaagtcttgatgttggcattacaagttttcctggttcaaattaaatgaagacaaagattaatttctgagattgagaggacmttatttcttgacttggttttgccacgcaaaaaggtgaaattagtgaaagtccgcctccataaaccttccctttttgaattttcttcccacctaagggacgatttaagcaggcatttcctgcctaaggggagccagcagattccagcctgcagctgaagaattaacactacgctgtgaataactttgtttactctcttccacattttaaaagaagataccagactaccacttcagagttggaatttcaaacaccagcagctagctgggaggcaggattgaatttggagataagaattcttcctggcgtccttcagcagcctccccaggcaggttttcacctcttcgacttttccaggactaagcctttttaactgagaagagaaagaaaaagaggtgagtgagatagccaacatctggaaagtgatttgttacagcgtttaaaacggagaaaataatcccatctttcaaattggcttgtttgtgttgcaaagcatctcaaactagctctgccactagcctgggaaggtagccctacctgcttcactcctaacaggctttggccaccactcaagagcgtcaggaggtgtgtgctggccaggcggagtttatacaccaagcagctcaaccaggaggagggaacagagctgaatttgggaagcagctgcctgctatgctgaaaacccctggaaacttgctaaagagctgtggtgagaatcatgctgcttttctcagacccatttctcttgacagaccatgtgggggaggtgtggccagtaaaatgaaaagagggcagcagattctcctccctttccttcctaaaacagcctttccctgccgtttgttagtagccactgcttgcaggcattttctacagtggctctgttttcatgtctgttgctatctgtgttctgtgagaacaacaatcagtgaatttttatcctccttcaactaaatgcaacctcagaatcacrctctgagtttgatttaccactggcctcttcagcaggattatctcatgtgaactgctagactcttgatattctctctctctctctctctctctctctctctctctctctctctcwcacacacacacacacacacggagagagagattgattaaggaatgtgaaatatttgctttagacttaaattggttccagcaatacctggatccacattgatttcagatcagacatttaatgtatgcaagtcctgttcaaacagaaaccagagagcgtgcttcgggagagcctagttctaatccagggagccaggcttatgtgtgtgaaagaaccagacagacttgaatgttgaattctgctttcaccaatcataaactgtgcaaccttgggaaaccattttattttacgcgttcagttttcttatcagtaaaatgggtagtacgttctggtggttgtttaaagattagtagtagtatatggaaagctagactctaacatcctccagggggcacggttaccttattttgggccacatagttaagtaactggaaaggataatttttaacaatcatagcttcatagttaagaatgtcagctcagattattctgcctgaattcaaatcccagctctctcatggttagctgaataacataaacctgtaaaatgataatggtagtagtaactattttacaatttctgaggttcatgctttttatttttacttatgtatttattttttttgagatgtgatctcactctttcacccaggctggagtgcagtggtgcgatcttggctcactgcaacctccgcctcccaggttcaagtgattctctcacctcagcctcctgagtagctgagactacagccatgtgccaccatgcctggctaatttttgtattttttggtagagacagagtttcaccatgctggccaggctggtctcaaactcctgacctcgggtgatccacctgccttggcctcccaaagtgctgagattacaggcgtgagccactatttctggccccccaagataatgcttctttggtaaaacccacagcattgcacccagcacaractaatactcactcaatgtcagctgttgttattatgatgcaggaatctgactatggagctaggcagttggcctccttcgactaaattcacctcatttgttgttttgttgttttcaatttaattatttatttatttttattttttgagagagtttcactctgttgcccaggctggagtgcagtggtgcgatgtcagctcactgcaacctccgcctcctgggtttaagcgattcttctgcctcagcctcccaagtagctgggattacaggtgcccgcccccatgcccagctaatatttgtatttcagtagagatggggtttcatcatgttggccgggctggtctcgaacttctaacctcaaatgatctgccctcctcggcctcccaaagtgctgggattacaggtttgagacaccacccctggccgttttgttgttttttaaatgagaagttggacaagatgaatcctaatgaaccttctacctcttagtggctttgttcctaattgcatccacatgcatgtaacatagccacacatctttctggtaggggccataaataaaattttttaaatgttttatgatggaaaaacagtgcaatgtaacatacgttctggacttaaaaatcattgccagctcataaagccagatgcgtcatttcatatgctcctataactgtatttccttaagaacatatattgtcacagcccctgatgcttctttgcatttctgtggctctggggactaagagacttgcatccaaacattttgtactgattttaagaaagtttattcacctaagttggctgaaggtggcacttgttagcatttcaagtttctgtattacttttgagaaggaacttgaacctgtgtctctgctttctgttggcaattaatatgtatctggcattacagctgagcagttggcagccagtttaaaaaccagcctggagtcactccccaccccgcctctggaggtgaggaggtaaacttgctggactggagagatttgcattttcctcagagttggagctcacccccatcagtacttcctttgctactttctccatatcccctaccaaatttacttcccacaactcctctacaggctttatgagtgccttgagctaggctagcacccttattaaatagaacaatcacagatttttagaattaattgttgccgtaagaccaccatgagggtagggaccatgtcttcttatgcttggcacttaaaacaggaaaattcttactttgcatggcagtgggagaccataagaatgaaaccataatgatcaatgagaaaaactatgattgacccataaactttccagttttttgtcaaaacgttaaaaattatctttttgttagatatatagggaaataaaaaatagtaaaataatattttattagtatgctattctttaaaatattagaaacagtgaaaattattatatttctttggaaaaaagagtagttggaatagtacttgcctttttcttcttgtcagtcatataacttgtgatacagagcaagtattttttatatgccttggcaaactgtcacacttttttctaatcatctggcaaccttttatcctttgcactttgtgttttgaaatacctacaagagttcttcaatgtaaatttttttgccagtatcatattctctgggacattttcatcctttatatcccagccaccttctttatttatattcataagtttgccttcagtaagttcctctggctgcatatgtggaatttctcaatgagcgttgaggtcgacattcccatagtcagctgtatcttctataattcgttgtcgcatctaaatttcacttacagcattataactttttgttttcttgctgtgctttcctcattgctgacaaagtccctctttgaattatccatttttgtaaaatgtctgtggatttatcactggagacaaggaggcaaaacaagtatgctttactgtctgtgttgtgaagtgaatagcaggtgctcagtgaccagtcactgacagaccttgaaagaactgacgtgagtcactgatgatgatgcgcatgtgttattgtgtagaaatttgtgaattgaagagctagtagcaggtttgtgccttatgcaatcactcatacttaatatattgtggtagctaaagtttgaattgtgttgttgggggactggaactactcaaatcatggtaatgaaaattcatgcatattggaaccatgcaaataaaaaatgtctgtagttactcaatagtaagggtctgttaaatgagttaattaacttgtacgttcacactgatctggtttgcagtcttatagtgtccttttaagtgtccttatagcttggccaactgctatcccccttctcttctcacctgtataagatgtccaaaatagctggttaaagcatgtctattaaaaatctccctttgaacaagtcattaaattctgagcctcatgtttcacatgctaaaggcccagattctttctcatcaaaattttcccttcctcagtacccagctcctcacctctgaaaacaattaatcagattagttgattcacccccagatactcaaagagctctcaggctccccagggtaggttggtttcttcccgcggtgagaggaatcagcatgtggcagagaagttctctcaaatgctgccttcacaagggctattcagacctggtgagcagcagaagagagggttcttgagttagagaagcttcttccctggccctactctctggtaattaaaaaaaaaaaaaaaaaaaaagggagggctgaagaagggagtcaaagataatcctaaactttacttactctttcatttcaatgtgttaatattcaagacggactgtgaattctggagatatgtaagtatttacagtgtggtggttaccagcattggctttgtcagatatgggttcagggagagatccatcacttcttagctctgtgagctttcccaagttactttatatagtctttactaagcctatgaagcttttagaacctcattcttccatctgtaggttgtaattattatttccctgggcttttgagaatcttgaaaaaggtaaagaacmcaatacacttggagtaccttttgtagtggaaaagcttgagaaacagaaatggttttagcttctcaggcataacttacataacttaagtgaatgtcattcttttttttttttyttttttttttttttttttctgagatggagtctcactctgtcacccaggctggagtgcagtggtgtgatgttggctcattgcaactccgcctcctgggttcaagtgattcttatgtctcagcctcccaagtagctgggactacaggcacgagccaccatgctcagctaattttttgtatttttagtagagatggggttttgccatgttgaccaggctggtctcgagctcctgacctcaggtgatccgtccacctcggcctcccaaagtgctgggattacaggcgtgagccactgcgcccggctgaaagtcattctttttactaagattttcttattcacagtatacaagagttctggatgtggagatagcatgtaatatacagattcaccttgatggaagttatccagtctgtttgtcgggaacaaaggctaagactggtgttttctcctgtctccttattgactgtcattgatgattaagaacctgtattatattctttatagagtcagtcccccaaattcttttggaacacctcctgctatagttttgatatttttgcccgccaaacttctcgttgtaattttctcccactgttagaggtagggcctaatgggggctgtttgggtcccagaggcagatccctcatgaatagattaatgccctccctggggtcactgagtaaattccttcagagctggttgccaaaaagggcctggaacctacttccaccttgcctcttttctcactgtttgacttctgcacatgcccgctaaccttccccttttgccaggagtggaagcacactgaggccttcaccagaagcagatgctggtgccatgtttcttgtacagcctgcaggattgtgagccaaaataatctctttataaagtacccagcctcagaattgtttttatttttataacagcacagatggactaagacatctcctttgagtgtgctcagaggtatgttcaaatctctcaagatcaaaacactcaagtcacatagtggcagggcrtctcttccatttctgctaatagtgatgtctcccctggaaaaagcagcttgcttcatgggcttctcagtcctctaacactgcatccattacaatgtgtcccaagtgccatatgcatacacctacagacttttccagaaagacaccaaataagagtcactgttaggcctgactgctgtgtgggccatggctctcagttctggctgtgcagggtatttttaaactgtagctcctttcagggattctcactcagtaggtctgaagtagagttgaggcacctgcatttaaaaaacgtttcccaggtgaagaatgggcaggattgagaattgctgctctggtgcctataggtgctggaatctgagatcaaaactagtcccagctgcagttgtctggacaagaatgtgaccttcacttgcctggtgactggattgggctaggagatgcaagctggccctacggtgtattagaacccagttgctccttattctttttaccccagggcaacattttcttcaatattgtcttcttagagagtaatcctactcatcttgacttaagtttttataacagctgcctaactgggctccccaacttcacctccctctcagcctctcagtctattttccaccctgccaatatacttacctcgctaaaataagaaacccattgtcatttcctcaatcttccagccatcaagaactgctgctgattgtttccataacatgggatatttctttttttctttctttttttttttttttttttctttttttgagatggagtttcactcttatcacctaggctagagtgcagtggcacaatctcggcccactgcaagctccgcctcccaggttcaagcaattctcctgcctcaacctcctgagtagctggaccatcatgcccggctaatttttggtatttttagtagagacagagtttcaccatcttggccaggctggtcttgaactcctgacctcaggtgatccggctgccttggcctccaaaagagttgggattacaggcatgagccattgcacctggccttaacaaactcttaatgaccttagaagcccagttttaagtcctgctctgagaagccgtctctactcccaattgcccacagcagagaggtgctccctttcctctgtgcacctatagaatttaaactattgcattttaatttactgtttatgaccaatcttttctcccaaaagcatgtgctgcacttgtctttgtccccctgagcataatggacccccagagggagtacggagcaggtttgaaggtaaagccgtctttactcccaaagatagaccagaacagggattgttcctttactattgagtcagtagccctaagagtatcatcgtttgtaagtcatttggacacagaaaagatataacccaaaggatctgtctttgaacacaataatgtaacctagcacctggctcctaaggcatttcaaaccacagtctgcaaggccacctttttttctgtgtcagcagacagtgcctcctaccacactgccacgtcactgggttcactctgtttcttaccagagaggggctggcttgcattgcatcatctatttgtaggatatttcaccaacaaaaggcagccaaacaggccatgagtttttctgtacttttttccccctgtgtttttacagacagacactgtaatcaactgtcgtgacagctatagtcaattagcctgtgggctgtttttctccatctagactaattgaactgtttgtttttatttttgttatcccctctctactcatttcccaactattactactggactatgtgactaagcccctacaaaaccttcagctactcctcttttctctagtggccacttttaggatgtggcagtaattcattaatctccagacagatttgcatctgcattaatatctaggagtctttatttatttgaaaaatatttttaaatgggttccctgctgttaaagtgaaaagcaaacatttaagtcatctagattagatgaattaagatttaaatttaaacttgcagagtgttgctttttaatttgtattggtggtcgttttttagggagctcagtgtgtgcaaatcatgttctctgtagcttcaaaggaaaaatctaggactttttcctagttagtgagaggtatactgtactttctcgaaaagacaggagctccaatttactgaagaagtttaagtagagtataacattagtacaatcaggagtggggaggtggagggtactacaaaatatttaagttccttttaaaactgagatttcagtaaatcacaagacaggaatactttcatgacagtaagcctaagagtatggttgttagagcatttgtaagagctgggcaaacatttcagtaacatttttttcatgcctacgcaattccaggtcctaagctaaaaacagaaagaaaaacaagatctagtccctgcctacaaggagcttaaagtctagtaaaagaaagacttataaaaaaccaaatacattaaagcattgaagattatgtgagaaaagtctgtatgatgggccaaaaggaaagaagtagaatcgagaaaaaaaaatctcttttccaaaacattctattatgtgatcaaaaggaaatcatcccttgacctctcgatctttggtttctatctgcaaaatgggtataatctgtgacagtgacctaatactttttttgggatccattttgaagagcatttggagaggacttaaaacagtttgtatatccccgagcatagataaatccccatgttaaaacacagtgcatctaaagcaacaccactgagctgtcaatttttatcactagttctataaaacttactgagagacactgaagttcttgtagaaatgaaaaatgagcaactgatgttaattccactggttaagtaggaaaagccagggcctgagagtaagacaactggccaagaaccccaggactggctgccagggctgctggctccctcccattctctagtctctgtgcttgaagctgtaacttaatggttttaagtaggaaatagatttattgatatgtggttttcttctgcggaaaatcaaaataaaccaaaaagaaagaaaaaacaaacaaaaaaacacgtgcttccctgacctttggagwtaggactctcatggagttttaaatgtactaagcagatctttattgagcactkgctatgttatgtgccaggcatggtgggcattggaggacaaatcaaacatgacctccatcctcacagagcttagaatccagtttgggggcaatcaaaatgcaatataatcaatgtaatcaatactatgggagtcttataggctcctaggtgaggaatgcttaattcagcctaatgagatgatcagaaaaggcctcctggaagaagaaatgtcaaagctgaggtgtgaaacattgagaagtcaaccctgaagagtggaaaggagaaggaacagtaagtagaaaagtaggacagggagagggagctctcagcttgtcctaggaagtgaaagtagttcaataggcaggagcttagatgagtatctggtcgggcctggattgctaggaaggacctgaatcagagaaggatcacggaacaatcgttatgcccagttgagtttgatttttagtctgaaggtagtaaaaccagttaagtggttttaagcaggaaagggacaagatcaattttgccattagaaaaaaatcacatctctctgcagtgaacaaaggacagtcattaagaagacaagggtggggatcatttgcctcaaaggtggaaatgtcaggtataggcctcagctggctgctctcttgcctctttagtgtggaaaactctaagattatacttatagtcgttcccaggttttgaatgcaaggaatccctttttaactgtttgagaatgctggtacttttagattctgttgataaagataatggtgaatgatagaatgatacatcaaattaaattattcacagtgcaatctatgtatatttaatatctagtaggaaatatatggagaagatattcttgattcagcatgtggaatgtttggtgcctggtggatttgaggattctttcccagaacaccaatgattcctgtgagtttttgatcctcagacttgggaccagagggaaggagttaaaattgtagttaccagtttcatccatgtccttgcaaggacatgaactcatcctttttttatggctgcatagtattccatggtgtatatgtgccacattttctttatccagtctatcattgactggatttgggttggtcccaagactttgctaatgtgaacagtgctgcaataaacatatgtgtgcatgtgtctttatagtagaatgatttataatcctttgggtatatacctagtaatgggattgctgggtcaaatgacatttcttgttctagatccttgaggaatcgccacactgtcttccacaatggttgaactaatttacactcccaccaacgtggcacacgtgtacctatgtaacaaacctgcatgctgtgcacatgtaccctagaacttaaagtataataataataaaacaaattatagttatcagtagtgagttaactgatcctctcaaagggctcctgtaatgatagctgttactgtggagcttactgtatccagcagctttagaaatgctactcatctttcaaatgaggaagcacatgttaatgttagagaggttaagtagcctagtatggcttctctgactgacattcacttcaatatatcctgagattcaaatgaattgaatgtttgaattccagctctactatttatctatgtgatcttagacagattacttaatctctaatagtatcagttttcttatctatgaaatgggtatactatctaccatatggagtcagatcattattaaagtagataatgcacattaaaaggcttgatagccctcaattaagtgtctccccaccattccttcttttcctctttttctttatcttttctccccatttcctctgcatttgcctacattttactctcttctcctcttcctcaattgtttcccctttagaactactccttttctctctttcttaatcttcacataatattaaactgacattttaaagttttactttagttacatttgtagtttctattcttaacataaacagcaaccaactgtttctgttttgttaagaacaaaacagttgctttggaatcaagttgttttatgtatgtgacccttagtagaaaaatatgtcccacttgcacaacattgacccaatagtatgttttcagacccactctggcaacttcacttacttcacacttttgatactctagagatgaatcatccacctaattctctgctgaaaagacatctgtgttcctagccaatgctctyttcatccttgcacattcgcaagtactctggcaaatactgtatgcctcagtcagaaaacagtgaagtcaggtctcctgaaatgcagccagcagttgacgaagcaggtgcrgaattacagatggtgcaattgccacagtgcagtagtgtgaagagagttttctaaagtactttttggaatttattcatccctcattttaaaagcatattttccattgcatattaaaatctacaataaaagcttaatgaaccaaactggaataatttatcttctggaaayatattccttatgtcactctttccctgagtttccaagtagcccaactctctgccctatagctttcaaggccttccatgatctggttttcatcgtcatctcattcttccctcctgctgctcacgtaggaacatgaaccctacatttaaatactttctttaggcttctcctgaaaaatactttgtcttgccattctccaagtatttgtgtttttgatgttcttcgactctggaaatccgtcttttatgcaaacctcacccattcttcaaatctcagttcaagtttttccttttttgactactccaagttaaagcaaccttctaaattcctttaatgaggtagtgtaacttatggggaaaattgtggaatctggagctggaatgcctaggttcaaattcttccccaatgatgagatctttttaccttcttcagacaatttatttatcagtaagaaaacagataagattttaagggttttaaaaagattaaaggaggaaaacatgtgaaagcactgtgtaactaatatgataatctgcctagtgtattcatttatcttttcctttttgtatattctcagtttgcaattaaacaaatatttagtaaaaaaataaatttttttttattttctttctttttttttcaacttttattttaagttccggggtacatgggcaggatgcgcaggtttattacataggtaaacttgtgccacrgtgatttgctgcacagatcatcccatcacctaggtattaagcctagcatccattagctattcttcctgatgctctmcgtgcccctgtccccactgacagcccccagtgtgtgttgtttcccactgtgtgtccatgtattctcatcattcagctcccacttataagtgagaacattcagtgttcagttttctgttcctgtgttagtttgctaaggataatggcatccaactccatccatgtccctgcaaaggacagaatcttgatccttttttttgagatggatttatgttctcttgcccaggctggagtgaagtggcatgatctcagctcactgcaacctctgccccacaggttcaagtaattctcccacctcagcctcccgagtagctgggattacaggcatgcaacaccacaccrggctaattttttgtatttttaatagagaggggatttcaccatgttggttaggctggtctcaaactcctgacctcaggtgatccacccgcctcagcctcccaaagtactaggattacaggtgtaagccaccacgcccggcaaatcttgatcctttttatgactgcatggtattccgtggtgtatatgtacgacattttctttatctagtctatcattgatgggcatttaggttgattccacgtctttactattgtgaatagtgctgcagtgaacatacacgtgcatgtatctttataatagaatgacttatattcctttaggtgtatacccaataataggattgctgggccaaatggtatttctgccactaggtctttgaggaatcactacactgtcttccacaatggttggacttatttacactcccaccaacagtgtaaatgcaacttttttcctgcaacctcaccaagatccggtttttttgtttgtttgtttgttttttgctttttgactttttaataacagctattctgactggcatgagatagtatctcrttgtggttttgatttgcatttctctaataatttgatgttgagcttagtaaaaaataaattctttaaaagaatatgtacatgcttcaccaagtagagtctaaaatgattatagcaagctctcaggtgacctagtactcctgctttggcccatggagcatgctttgattagcaaggcttcctgtaaaccctaataaaaagacaggcaatggaaacacccacacacttagactggagtctagacatgatacttgcacagtgaccctcatcttartgttcaattatgtttttctgcctgtaacttttcttacaactgtgaaagctggctagctgggtagttaccttggtcacacatagatattagtcagcctgaggtgccaagtgtgttacttcagaataaatataaaactcaccagcaaacttgcagggttcccacagggtgaacttgatctacactgaggtgcctgccctatgacgacagtccaatgactcacttgacgtcaagtcacagatggacgtcatcccattacccgagaagacctccttttgtagcaaatgataccacagaggcgtccaagtgaggggaaatgctgggaagctagttatctgtctaactaaccttcagcagtgtagtgcctctactgagcagagtggtcatagcatctatacaccctatcccatgtgattgtccctttamacagcttatcagtgacattttggcctttgctgagttgtcatcttctttatctagttctctttgtgtgcacaaggcaagaaggaatgtgtatctgattttgaattgcattctttgaatgcacagttcaataagggggttggtgactgctgaggctatggttttatagtcaggatctagttatgtggaaccttaggtgtgtcacctaaccaagtatcaggctttacatttgtcaaaggggctgtgagaataaatgagacagtccatgttaagagtttaacacagtccttgggtacagttagtgctccatgaaaattggttacatttattagtattacaaatgattgttactagcatatttatgttactataatactttataatattacatttaccttttttattctggagtatatttatatgaacccattccacctgccctcagcttcttctcgctactagaaaaatacataggatttggagtcagaaaatttatttctgttgtatttacaagactaaaccctaaatgtctctcatgtcctactaactacatgaatgtccttgtaccagtttcaagctttggttatgccgtccacatctgcaaatagaaacatgttatatgaactatatattgttgttaattagtctctgattatcctcttctgtcattccaataccactgctctttgttcctatgaattgtccatcttggcactcactatcttatactaaaattatccgcttcttgtgtcttcctcttgagtggatgaaaagtatctggccaggcaaggtggctcatgcctataatcccagcatttgggaggctgagcgggggtggatcacttgagatcagaagttcgagaccaacctggccaatgtagtgaaaccctgtctgtatcaaaaataaaaaattaatcaggcatggtggcgggtacctgtagtccaagctacttgggaggctgaggcaggagaattgcttgaatccaggaggcggagattgcagtgagccgagatggtgccactgcactccagactgggcaacagaataacactcagtctcaaaaaaaaaaaaaagtaccttatttgctgtgctgggcttcattccatccacatttcacatgtgttaaatgaaatagttcaggacagtgtacccacctcatattcctctctcctttgttttcatatgatcccaggcaccctattttcatgttacactttcccctttgctttttctaaaatctttcacaaaatgctcacccacaacagtgagacacacctatccagtggagtgtggacagcaagagggtaaagctagaaagggttgggaaaggaaggcctaacctgatttttagaggctgtatctgccctttcaatgatcacctacttacgcttagaaccttctttctcctgccttcttttgctaagtaaccaggaaggtcaagtgccattgttactttccaaatgacttgggggggatcacttccagatacatcaagttctgcttctgaagacctgtatcaacagttaatttggagagtcaagtttcaccttctgaaacaagccaaggctgttatgtaacctgaagttctttgttgaaaacaaaacctgcagatgctgagaaagctaaattaaacttcttacttgccactcagccactaagcatcacaggcagcctagagaatattaccagcactggggtggtaaatgtaatgattgtaatgaaacaccatattcacctaccagccagtgtgattttaaaagtctgcccagattagttggccagaaagcaaactaaggtggagctgaactttacaatgtggttcttgcttaatgagcaatcttgttgaaaaaactaaagttatatatatatgtgtgtgtgtgtgtatatatattatatatatgtatatataatatatataactttatacatatatacgtatatgtatatatgtacatatatgtatatatacmtacatatatacacacatatacacacacacacacacacagtgtaaaattttgtcctaggcatgctgatttcagacttttatttttttcctctcaaaaagattctttcttgatgaattgcatrattaagaaggggacctgaatgaatattattggcagctaccccaggactcagacttgtctcttacctttaagaggggaagagaacaagcagcggttgagtacataccacatacagtggactctgcttgttcccctaataaatcatcaagtaaagtcagggaaatgggcaccagcagcctcatactagagactatgaaaaacagatttacacaggaaataatttgtccaagatcactcaactagtaaataagtggcagagctggaatgcaatccaagtctttctctcatgatccaaagagaatacccactawgcctacacagccttgggcattgatcttctatcccccagtttcttccttagtatctgggttccatatcccattaaaaaaaaggattccaaaatagatccttcagtctgcagaatctaaatgtaaattgtaattaagtagtattagctaattaggtactttaaggaaaatacagtactttaaggaaatacatagctctgtaatttaaaaaaatggcaacatattgcaatttttgaccataaaacacaagtgatacgaaattggggaggtacataaagccaagtattgaaagacatttgttatcatattgtcttgagaatgattaccaaatttctggccttgttttatggcttcacacctttcataggttatatagctgtttctcctctttgtttacagtcagatcttgggctactgatactttctccctgtcaggtattaaatagcaacgtatattatatttttctattttcaacatttgtgctggtaattcatgccaaaagcaaacatggctcattgttttttatctgacattcaacaaatatttattgagcatcactgtgtacaggtactatctgtttcctaggtactttgtgttctagagattttcccatatgtgccactgtgaacattctaaatgtttcagatctagtttaggaacttcaaatataacttaaacacagaataaatttccaacaattatcataatatctaatatttattgcaagattgccatgtgccaagtattaatgataagagcttttacrtaaatttcatgtaataatcaccacaacctcatgatggaatacaattagtatcatgcttttttgcaaatgaggaagctctggatttaaaagactattacatagttcactcaagatcatataactagttaaagtatcaaaggtgggactctaactcaggcccatatgacagaagctgcacgtttttaaccctatgcattctgccttctggaaaattttattctgttagggcaagcaaacattgaactatgtgtgctgggtgctgggatataaagatgattaagacagggttcctgctttcaagaaccgtgagtgcactgagagggaacagacactcaaccaatctcaaaagcattgtgcacttgtttgtttgtgtttttgttattgctgttgttattgttgttgttgagaccgagtctcactctgttgtccaggctgaagtgcagtggcaccacctcagctcactgcaacctctgcctcccaggttcaaacgattctcttgcctcagcctcatgagtagctgggagtacaggcatgcaccacaacgccccactaattttttgtatttttaataaagatgggttttcaccatgttagccaggctggtcttgaactcctgacctcaggtgatctgcccccctcggcctcccaaagtgctgggattataggcgtaagccactgagcccggccaacagtgtgcacttgttatatgtcatgcactgcacggtactggatataattcaggaataaggcacaatctctaccttcaaggaactcttgtcagagacagatatagaaacaggaactcctaagggcaactgatttctacttctgttctcctatataggagaagtttggatgcttataggccctgggggagtcagtgttgttctagggctctgcagccagtcctwcagcctcatcttttgttctccatttattgatgacctcaggcagaccacttagttctagaaagctattttctcgtatttgaaatagagataaaagtatatataaatagagataaaagtatgacctacttcatggagttgattttgataattaagtgataaaatgtatggaaagtatctatgtttgcttgatgataagtgttaattacttttgttgttatcatgaccccatatgggttagaagaatcttaaaggtgttgtcacctcttgcactcagtcttgcattttttctgccaaactaactcaaggcattgctgtagcaaccagcttcatccaggtgtaactgacaccaccttgccttagctgccacgcctctctctgctttctacccgagagcccactcgccactctggcatgcacaaaactggacrtgcaagggagttggcatmgcatgtggcaactctcgacaattggagaggaagggaactggtgggtagagctctcctccatcccttggatagatagttctgaattgcattgtgtatgctcctcagaaggtttccctgcttcctctttcctcttctcaggatcactgctcaaaatgaactatcacatgtgagcctctgcatatattactgcaaacctttgattcaagctctgctttcctggggattatggaagtgcagttggagaggrtgagaatcataggagttgggggatattatgtatttggattccccctataatatctttgccaagtggtcattcagccgctgccttaacatgtcctatgaaaggaatatgctgtctccagtaccatgtctaggcactagacacatgtccccggcacctagcacaacacctgatatagaataggagcttaataaacattgtcaaataaatttttaagtaaaaattttgttggttttaaaatgtttttttttttttttagatggagtcttgctctgtcacccaggctggagtgcagtggcgcgatctcagctcactgcaacctctgcctcccgggttcaagcgattctcctgcctcaacctcccgagtagctgggactacaggcacccgccaccatgcccagctaattttttgtatttttagtagagacggggtttcaccatgttggccaggatggtctcaatctcctgacttcatgatccaccagccttggcctcccaaagtgctgggattacaggcgtgagccaccacgcccggcctagttttaaaatgtttaattgtgaagttgaaacttttgttggtgtgcgcgatgactgcaaatctattgtcttttgccttccaagcatagttctacttttccaagagccatgcaaaataagccttcatatgcttttgagtctatgtggttttttcacgaagagaattcattgctagagaatctgtaaatcttttatggcatattttaaaaaataaaataatggaattaagtagaaactgtaaacgtttctactttatttaattgatataggattatattcttagatttattttgttgttctttttaaatgttagcaacatggaaagtaaagtagatttgaatttaaagggttagaagtttatttattaagaactacttgatgttttattatcacaataacagatcttcataatgatagttttgagtcatcagtttaaaaacctattatatctagtatattattctggaggtgaggcaagtatttaataatgatgttttgaaaagtaaagtaatcgcaaaagtaatcaatttaactctctccatttgaagtcttaatcttcagctatatggaaaattcagatattcagaaagatacttcttttctctgaggattccagagaataaaagtttacttgataataacaaataagttgatttttaggcaatcacatgtattaattccaaaataatttttttacattgaagatttagcctggagaaaagaagtttagaactcttttaataagtgaaaatatgcagaggaaacagagctgcagctaattcccacctgcattcagaaagtacaaagggcaagtacaagttaggtatatcacattcctgttcatgtctatgctttattttttaattaaattaattaacgcatttatttatttttataatttcaacatttattttagattcaggaggtatatttgtgcaagtttgttacatgggtgtattgcattatgctgagatttgggatacaaatgattctgtcacccaggtagtaagtgtaatatccggaagtttagtctgaataacttaatatttcagtgactttaaggttatactcagtttttttcctgctgaattatatctttattttatttttgagatggagtctcgctctgtcgcccaggctggagtgcagtggcgtgatctcggctcactgccacctccgccttccaggttcaagtgattctcctgcctcagcctcccaagtagctagaattacaggcctgtgccaccacgcccagctaatatttttttttttttttttttttagtagagacggggtttcaccacgttggccaggctggtctcgaactcctgacctcaggtgatccacctgcctcagcctcccaaaatgctaagattacaggtatgagccacctcagtcggtcaaattatacattttttttaaaaaaagaaaaaaccagaaactatttttcaattataatggtattacatgtttattgttgaaactgcaaaatacagaagcatgtttaaaaaaacaattgaagaactaagcaataatttctactatccagaggcaaccactggtttctgtttttgtctcattttagtatcatttctgtttatgaaatacataagggaggttatattatatgtacaactaactaccctggttcattttagttacattatagcataagcatttaacaatgtcatctaaaatatgttacaaacatttttcatgcaaagtttttcatgttttcagatgcactcttttttatacttccacagcctgccagcttttacttagaaagttaaatatcttaaaaggatattttattgggatttttttaaattataaaaaataaataaggcaataaaaaataactattgattttgttgtaggtccttgccatttattttctgcatcctataaaactgtaattttattgtacatggtagtcatggtagttgatacttcctttttcatttaacaatgttttgtgggcacttcttcatgtccatacattttttttcttttgtaaaagtaaattttaaaagagatctaagattccataatagggaagtgacactgttgacttagcctatttaccattattaaacttttaggttgtttctgatttttcactactgtaaataacagtcatgatgagtattaggttagcttgttatgggttatttatatgatctttcagagctctcatctaaaaaccaaagcttttcaagataattggcatggaaaataattatttcaaatgtaaagaaaactttggtttttgttgattttttttgagacagagtttcactcttgttgcccaggctggagtgcagtggtgctatctcggctcactgcaacctctgcctcccaggttcaagcaattttcctgtctcagcctcccgattagctgggattacaggcatgcaccaccacacctggctaatgttgtatttttagtagagacagggtttctccatgttggtcaggctggtctctaactcccgacctcaggtgatccacctgcctcgacctcccaaagtgctgggattacaggcattagccaccaggcccggccgtttgttgaaatttttatgtgtactcttccattaatgcttggcattaaacattacaattcaagaacctaggttaataaagtcccattttgtttctttgtcactgtttttttcatcagtgggtttacaggatccagattatagaatttgtgtgatatggtcagagagattccctttatattccattgtaggtgacctttattataaacatatttgtgagctacagaggaaataggctttaaccagttaaagatgctgggttaaaaggcaagagcatgtggctttcctggggctatgtgagagttcaatcttgtctgtgaaatgctggaacagcacagatgtaccatagaggataatatattttcccccctggggactggattgatgcgtcattatattgtcatttacagtgcttttcggaagaactgcaattccttaccatcagagtatatttgctttcttcccatcacctccttaactaataaaatttgtatggactgcagaaaaattgctgtatttagcaagtttcattattagcatctctttctgctccaaatctagagaccttaagtaacttgaaacttttaaaagaaagtgctttggttagcctttatttgtccatgaagctcaggctaggtaggaagaattttcatgagcaccaggaagagacagatcagtgtcttcaacctcagtttcaatcaacacacaggaattagagctttctctgggcccagccccagtcagaacatggcacaatttagcagtgcaaggtggcctagcttcctctgcctycaaacaaacctggccttcttcttccccaacagactcatttctttctcccaagcctgccatgtaaatcacctacttcaccttcatgggcaataatgacagctaccatttgtagaactgtgtcagtcttgatagtagatacttagcgttaattactacatttgctcctgtcaacaccccatgagataagtcacattctacctttttgtagataaggaaattgtgatttataaaggtaaaaaattgtccaagttcataccattgttaagtagaagaagatgtttgaaactgtaggtgtctatatcctggtcatttcaccacaccccattaaaaaacacttttttaaccagtactgacactgttaatccttttgtacagaagtgaactacctgtttaagagaagatatgttaggggaaaaaaaaagtgaaagttaaggggaatttgctgagatatcctgatcccaagccaacactgagtttgcaaagggggtaagtccctggcaagatcaggcaagatactctttcagcaggtatcttatacagctgacaaagaaagcacaaaattatctttctactataataatgtggaatagcctcaggaygtttccctagcagggcaatgctgactatctctcaacttcaaattaagtaagttgatttgttgaacaccaaattacagaaacttccttgtatactcagcattatgtgatgtggcccctaggcctctccaggcttacctatcaagctggctcacttgttctctgggacccagtcatactagacttctttcccttccctaccacgacaggttatcccagtgtctgtgctcttcctgttgttttgtcctgaatgccttgtatatacacacatttcaagccttttcaagcctttcattaagtatcatcttctctatgatactccttccacatcaaccacttcctttgtatgtcccggtataactgatgttgacttctttcatagcgtccctaattccatacagccttctttgttcatcttcccttaatgggctgagagctttctgtgtacaaggactatgtcttattcttcctcaatttcctttgtttaacccaaagattgacctgaagtggcccctaaatgatggtttaatggatggatgaatgaatacaaagatagatgtttatgatcagggctaatatttactgatatctactccagacactgttctaagaaaggtatatttaaattcttaaatacattatctctttggatcctcataacatccctataaggtagggattatatttatcctaattttattgatgggaaattgaagttcagcaaagttgagtaacttgccaaagttactcaactaatgagtgacagagtttgtgttcagatctttctactttcagagctggaattttcaaccaccataactaacaatatggcagctacccaaagggggtttctcatcaccatctcccggactcctgcctgcttgctccttttatagaatctacttaaagaagcatctaacaaagcctagacatcctgttgtgtgcgatttcccaaacaagtacccaaaatggtgcttttctatgttacaaatgctgtgttttaattcaaaagaaactgaaagaattagtctttattttgtcagccacttagcataaccctaagtaaagcaggcactactagagcaattgtttgggttacaatatctgaacacttgtgattcattataatttcctacctttgtatctgattattaaattttccttttcagtgcagatggagcaaaaaaaatgtagattatcaattttgtgactatataaaggattttattcagagccagtttttttttattttcattccattgtggcattttcaattaatcccgcaagatgtattatttaaggacattgaataaattttttaggaacacagtgaaagaaaataacatttcattggcaactgttcatcttttctcattttgttctaagacattcttgtttttaaatcatttctaattctcagagtcatggatcratctggtatgtgttggattttgattctctacattttgtagtctttcatccactgtattcaggttcctaagtaaaagctccatctttatttctaagtgggctttttctctcaaatttctgggaatagagctgcatgacctaggaagataccagaaggtcatcatagcctctttgctccttaagtctcaatgaaagccccagcagtcagcctcctacaacttgtctccacctctctttggcccttgagcagaaagttaaggccaaggaagggctccttcccactctttctcaaaaagagaggataatcttcactgatgtgtgtcaatgcttactgtgtgtcaagccccatggtaagctctttcaatacattattatatttactcctcaaaacaaccttataaggtatgtaccaattgctatcctaattttattatttaaattaatttaaatatttaatttttataaggtatttattgaaaacttttgttcctctcctgccctcattcgtctcacaaagctaatcactatttttaggtttttgtgtatctttctgtagtttcctttgcaaatgcagcaaactgtatttgtgtgtgtgtgtgtgtgtgtgtgtgtgcatgtgtggtggggggatagataagatagatacatacatacatacatacatacatagaaagacagacagatacatgcatacatacatacatacatggaaagatagatagatagatagatagataaatttttagccccattcttatataccaaaggagcattctataaacactattctgtattattattattattattattatttttaaattattattatgtttttttttagacggagtcttgctctgtcacccaagctggagtgcagtggcgtgatctctgctcactgcaggctccacctcctgggttcactccattctcctgcctcagcctcccaagtaactgggactgcaggcacccaccaccacgcccrgctagtttttttttttttttcttttgtatttttagtagagacggggcttcactgtgctagccaggatggtctcgatctcctgacctcgtgatccgcctgcctcagcctcccaaagtgctgcgattacaggcgtgagccactgtgcccagccattattattattttttacttaatgatgtgtcttggagatctttatgtatcagtacatagaaagcttctccattctttcttacaagtgtggagtagcccaatgtgaattgtgccatagttttattatctcaattttaaagatgaaaccagttccaggagctaaataactttaacttggagcagagcaggttgatgtgctttgttttcttctttacatcctttttaactcatgtgatatattggggacatctatccttatgctcctatctgcctttattggggccctttagacgtcttctctagacagatatttggaagcagttatttgtaataagctttggaaacctagggcatgatcacaggtcccaaagtttctgatgtttgcatatattcagaactattttttttctgcccctgctggacgtctacctgcagcccacttctcacatgtcaaagatgcagctctctcttgaatgcagcaaaagctactgatatttttggctgtcatttagcagccctctgcctctctaatcacctgatcccacctggcgggttctgaactcttggccgcagaccctgactttacaaccacactctggaaggtaacataggatgtggaagagataacataggatgtggaagagataacgtaggatgagaagagataatttaggataggctttcagagcttggcacatggcaaaaactcagtaaagatattattatcatctcatgaaattctttcaaaaccatttaactatagtacaattattatacctgttttacagatgtgtatactgaggatcagaaagtttttgttttgccagagcttacagtccttaagtgacagagatgatatctacattgaggtccttccaggctaggtttctctatattttatcatcaaatagaattcagaagaaacccatgataccaaatgtcacatggaagtacatatttagtaagacattgtacatacagttcaggttcactcacaaaataattttactatgagaaaagattcatgattggcataagatgctgctatgttcttctgcacattataattatatgaaaatgaaacacccactgccatttctgcaaacctatcatctatatatttcatttcagtctcagaaatgtttgaaacagggtttttagccaattttggaaagaacatttccctctcagcaaacataattataatagtaatagtcaccatacttgttatatgccaggcactgtactaagctgtttacctctattatctcatgtactccccatcacaaccctgtgacattattcatcatagtcttcatttacagatggcattgatgcttaagtgagactcaatgacttatccaagtttgtagcagctagtgaatggcagagacttgatgacaatcaagccagtctgtaatcaaaagctcctatgtgaaatcactgtgttttatcaagttggcctataacaaggttcagagaccatgagccaaaccyattgcaagtcttttagaatcacttcttactggccaaagattttaaagtaaatgtcataattcttaccagctggtatctcaatattctgggcctctctgttcttgaaaaaatatcacaatgtggtgcatgttctttttaaatcccacctgcattgttagcacctttaattttattaaagctttttacataccttatatgccaagtcagcaacttttcttggccaggctgctagtagaatccccctgccatgccccgaagacataactttttctttctaagcaacaccattcccaagtttggtctttctagcttacatgtttagaaacagatcagcttgttatacgtaaggggttggaggttgatttgtcttaaggagagttcmaaaaactgaacttactctggcttaaagaactaagtgtggtcaaccaaatgccccttaaagcaattaggtaccatctgcttcccaagactttgggagtagagacctgctgcttagaaaccttgtttgaattagtattacaacaagccagtggcctgtggtttgattaattactcatgacttcttacataaaagtaatctttcctaaatgtattctttggataattagaggtcaagtatttgttattttagagtcaacttcattttctttctttaagtagcaaatttaatattgttcacttcagttgatcatttattgagcacctactttgtgctaagcactgttcaaggcactttgaattgttaggtagaaaaagtagaaccaaacttctactttctcctccccagaattcaaaatgttacaaacactgactcatttctttgagggcaaagagcatgtcttgttattcttacgttgaacacctagtataggacctcacccacagaaaaatttttgtttagagtaaaatgaatgatctcttctttcatctgcttttstgaaggtgcttttagcagcattgaaccacagaaagggaaattatatttctgtttactatggcgaaaattaaaaatggatttttgacttggtacatattctcttttgtcttgggctcccatagtgctttgcaactctccaatagcagtatcacttttcttccatttgtgactacgaagtccttcatgttagggaccatgtcctatttctctgtttccttactatgacagacmcaatactctgcacatagkcatttactcaatatttgtttaattgaattaatcataggctgcctcatttccctctcggaaggtagagaacacatcttggtcatttctgtttccattatatctatagtagattatgatgtacattttgtacttaatgtatcatcagtaaatgcttatggacttcaagtctcctcattcccttggttggatttttttgtactaccattttgctttttcatatcaagatgcccaaaactgtgactcaaggaatgagtgcctttactgactgactgactggctggcttacctaatgagtaaataataataaccaagtacatatataaagtgcattctcatatagccacaaaatgtcgccctctcacctgccacgttgggaaacagggtccagaaaaggaagagcttatctaaggtcacgttaagagattgtgccaaagctaggattagaatctagatttcattacctccagcccagattttctccttcctaatattagttctcccttcttttctttacattcccactgctgccatctaagatcaggccctatccctcctacctggactgctgccattgcctcctaactgttctctatgctcccagcctcaacacctccagtccatcctccacctggttgccaaggtgattttctaaagtgcaaatcagatcatgttcactctgctgtttaaagtcttacagaggctcccatggcctatgggatggagtcccctgacccacatgacagagaatgatccaccccgtgactcccaagcctgcctctcatttctctcctcagtctgttttccagctgggttcaaatgtctacagtgaccataaccttcaggttgtttcacatcacggtggagcctgtcccaattcctcctgtgctctctgcccagaccatcatctcaacctcttctcccttggttaacagcttcttaggccttctaggtagacagacaggggattttctttttttgaggattttctttttttgagatggagtctcactctgtcacccaggctggagtgcagtggcaccatctcggctcactgcaacctccacctcccaggtttaagtgattctcctgcctcagcctcccaagtagctgggattacaggcacccaccaccatgcctagctaattttggtatttttagtagagacagggtttcaacatcttagacaggtctcgagctcctgacgtcaggtgatccacccacctcggcctcccaaagtgctgggattagaggcgtgagccactgcacccagctaggactcttttactgaatcacaaactctatcctcttcccctccccacacataatttctccctcattagaggtgatcgmtaagcacctcatatattttcttctatcttaatagcggtaacaggcctttcactttcacttagtttgtgaatcctcccagttctgtgaacgtcttaagggcaggggctgggctattcatgtttgtattcccagaacctggcactaggtcaggcatataatagatgctccattacactgctgctgactctctggaataaatatagcttccataacccttcacagtgaattaactcaacttatggttttctttaaattaagcctcacatggaatgatagttgaattatgtaagacttaaaggaaagagaatgtatttaaagaaaaccagctcttgaaaatgccttacttttataggtggtgaacaaatatttcgtagcaaccatgggataatgtatcagcatattggtaatgcaaagtagacggggccactgaatgtgtctctgaagctctttgccactgccttcccactgcgtctctctttagcccccagtttactgaaagaagtcagtgtggttacctattcggtgaaaagaacttgtgccacattccgatctttcatcgtggagtagattttcagctacatttccagctccgttgttaaacccattcctgcctgatttgccaattgctaaagtgttcatttgttttatttatttatgacgcgagtcccttgggttcaaaaatcgcttcaaaatgctactgctccatctggtttaaatagagcatactaggaagaaataagagaaacaatgggaccgtgaggttgaaggaagaaaggaacagtctggcaaacaggaagcagaaggaaattaagattcttttttctttctttatgactttgtgctggggggagggaagctattttcagcaagaagatatggttgctatctggaagttcacatttctatctgcaatgatctgatattcaaaatctatgaggtctgagtccatgaatgactgtgaatcatgttcaggcaggctagtctccagggccsgggacaatggcctttgttcttcccttttcttatctgtttcattattctcttaggcacttaatatgctgaacacaggcagccctgtaggatgttctttccacgcaagggtagacattttggctttggactttctagattctccagcagaagagccatttaccttgctaatgcttttcatttgtttgaagtccttgaagggcatggtggtgagagatttagttagagtcccagctctgytgcttactacctgtgtgatcctggggacacggctttgcttaacctctgagcctcagtttcaatagctctcaagtggaccaataatacttatgtattaagcttgtcaagaagattaaacaagctatgtaagagggcttcacagtaaacactcaggaatcaatagctatttttataagatctgactgtacttcattttacatgccctttgggttttacagcactcctctgtgagaaagatacagaaggcatttttggcccaatttgacacaattgcatgagggaaggggctcacaaacccgagaaaccctgctcccagtgattggtccctttccgatctgtcacctttggcttgtggttgcatatcctctcttcaccttttctaaagaatgactcagagcttttccttttgacagcaaaccctctgaaagagagacaatagcaatcaaatactttggcattattcacccggagagctaaaagctgtctctgccttccacatttagagtgtaggatactgctttaaaaagcactaagcaaggacaaaacaatgtgattgggtcacatctttaatttgtattactttcccttttatcaaaagggaagtggacagggtacggtgtcctccacaaagaagggtaggagagaagggtggagcagcaggcacagagctgccttcgccgttcccacaccctactgctatgcacggtttgattgcgtgttgcctgctgttcatttggcccttcctgaagggactggagggcaaaacaaggactctgcttccccaaagttggggaaggtaattagaagctgcatactacactcaaactgtccagtgactattcaacagtactaaaataatgctcaaattcaccagacaacttttcctgtgtgcactcatgcccccagacccagcatggtcagccaatctacagtgaatttatttcaggcatgtgacaagggctgacacttctcctcaatttggtactgtaaaaactaacaataatatgttagttataataataccagtagctgttacaatcaaaactcaaaaaaaggtttaaacaattagaagcttatttactttctcagaaagtctaaagccggtcttcttggctaatgggcaactctcccctggtcagtgattcaggaactttggcttttccacactatggctccttcatcttcaacatgtagctctgaagccaaaagattcattgcatcaagctagtagaagggaaataacatgaaggcttgtgaggggattatttttatgggccaagcttgttcccttacattggccagaactcacattcccttggcccagactcagacacatggccacacctaatttttagggtagagtctagttttgtgctctaggagaagaggaaatgagtttggtgaaccagatagtctctgcctcaaagtagtaatgacaaaaattaacatttataaagcatttrttttgtgccaggcattggctaagccctttacctacattatttttaaattcatataccatattattcacttgtttaaaatatacaattcagtggattttattatattcacagagttgtgcaaccatcaccacaattttagagcattttcatcatctccaaaagaaaccccataactattagcaactcctcatttcctcccaccccctacctccagccctaggcaccatcaatctattttccatctatatggatttgcctattctaggcatttcatataaacagaatacctacattcttttatataaccctcaccatgatcctaaaagttaggcatgttattacttccattttacagataaatttacagagaatcaggctgtttaaatgatttgccaataattttaagccctgctcatcattgaactccattatgctgtactgcatcccagtcatatcatgccatgatttgttgcagggaaggggtgtttgtttgcttgttttctaatgactattatggcaacaaactgacttctttataacaggctcctttactgaaatgacaggcacttaggtgtcagaaagcttcaggtttgaaactcagatctaccacttaccggatacatgaaaaatatacactgcttagttcctcttgagtcccagcatctttatctataaaatgggaataacaaattcctgtttgcggggaggagtcaatgagattaacatatgtgaaagctcttctcacaactttacgtagtccatgtcctgccagtgtagttgtccttgcttagaagtgaagttctaactataattgggcagccacagaaattatgttcacatgtctggtcttctggataccgtccaggaaaaaattattgtaacttgcacttttcggtatccacgttacaacccaggagtggccgagacccttggagaatctgctacaatgagaatgagaaaaaagggaacatattctccaggacagcaaagcatatgcagagtatcttctatcggcttctgatctccactgggcagagcagcttgttacaggcacctagaaccagctgagccagtgtaagtttgaagttcgttgggaaagaagataagctggctgagtttctgtaggcaaagagccagtaatgaggtttccagcattccatcacaygtccttttcatcactttcagctcagccagagacagcagagcctcatacgcaggggccaagtgtgtatttgagagactcgaagagggagaatgaaaagtattgtgaatgagtgaattgtacttttgttccattgacctgttccccaccctaccctgtccttagccataaatatattaaaagctagataggagagtacagagaagacagtggaggcagtggggaagttatattacgtgtggctagttaagttacatagccagaagaggccagaagagaaaagtgtcctgaactctaggtgagatcaagtgcatatttcagccttaaaaatttatcctaaaaacctctgattctgccatttcctaagtgcatggagaagtgacaacctctctgaacctacatttccagataggattgttattggaaccatgacttagagccatgcaagctgcaacgtgcacatgtccagtagactccagtcatatacacaaggggccagcaaacttgttttgtcaagggccagatactaagcattttatattttatagggcatacaatctttattgaaatagtcaactttgccattgtagtgcaaaagcagccatagacaatacataaatacataaatggatgtagctgtgattcagtaaaactatttgtggtcatgaaatttgaatttcatgtaacttttatataaaagtttcatacaaaacagtattcttttctgatttttctttccacaaactgaaaatgtgaaaaacattcttggcttatagactatataaaaatggacagtgggacagatttgcctgcaggccatggtttgcagacaccccccccacccccacccacagcatggaccgaaatgtttgataccctctacagaggtataatatggtgtccagattattgtaaagagcaaataagtacttgtaaaggcattaatgtagtgtctgccccttataagtgttcagcaagtggttattattacaattagctcttttagaaataatgaatattgactctctatttgccactgacctttgaggggggagagccattacatttaggttgtttaacatttctactatattaaacttgtattataattaaaatatatattaaaaataaaaactaaaaaactggtttgtacagatagtggcactagtaggccacagagtttttgggttttttctattgtcccagtgttgcttcttcaattcctagatatttctttagtgcttggtctgtgcttctgggtgctccataaatgaatgagattaggtcttttctgtctaggagatcttggtattcttcaaagtgattatacgcaccccagtggtagccaagaccttctctttttattaatttttcatcacagcctttaaatttctgttttgttatatgttttatagtgtgccacactgtgacacagtaatacagttacacaataatttataatattttatgtatataaaaatacataatttatatttacataaatatttattaaatattataataaatataatattataataaatatattataatataaatatatattatataaatatatataatatatattatatatttatgtaaatatataatatttacataaatatatttatgtaaatatcaattatgtaaatattaagataatgggtgagtatgcaaagtgattttaaatgatggtgtcagcaagcaaagttttgaaaccactggtttaggaagcaaacagatgaatatatcccaatgggaaaccagatttggtatgagtgatgaatgttcttattcacaatgacacaagtgttttcaggacataaactgacatttagtctggtgtcttgttttgacatttaatgtaagtacattgtgtgagaaacaagatagtttacattttttttatttcataagaacacaacagctatatgaactagataatattatcctcatttgatagatgaggaaccaaggtttaattcagagaagttaagcaacttgcaaaggtcagcttgaatgaatcaggactgtctaactataaagcatgacattttccactttagccttcattgcattgaagaagttcataaaaaaagatgattagtctctggtattcctactatcaagttagtctttttttccatcacatgtacttatgttattaagtgctaaatggataaaatttcactcctccagagttccgtggttaaccccccaccatctctttgcatatgcttcttactctgattgcaacacttgttgtttggatatctcaatatctcctactcatctattaagacccagcttaagactcatcctctccttccagaagccttcatgacctcagtctccagactgagttattagatgccattgctctcaacctctatagcaccttaatgaaagtccttataaaaatatgctatgcagctgtgtagttagctattatctattaaatttattactccctggactgagagcctaaggagagggagaatatgaccttgattacatcgttcttctggcattcaacrtaataatgtagtgcctgggacatcgtaagccctccatatatactcacagaatgaaggaatctcttctttactgatttgaagtctgagataactttggcaaagggatagattgaagtggtcttaactaaggtttctcaggataggacaaattggtggtccccaaattagattataggggaccagataatagataaacaaagaaggcaaactcttatatgtaggaaggctttctccttctgagttttctcagaaattgaagaaggtacacacaatcataccactcaaatttatattaatgatgtatatgacatcaatatatattaatttctatatatacttatgtttatatgtatgcacacataytcatgaacacgaattcataaaaatagactgccacaatttctataaactgtcatggggatcactgaatgttcaataagagggtgaagtttattaacactctccaggctggtccatcttgcaaagtcatccagttgctgtaaatctcccttagtcctaaagtcgtttcccttctggatgcataaatcttcacttctttctttgaagggaactagcatttactgaaagcttttttatggtgttctagatacttaacaraggtgatctcatttaatcctcagacattcgcacaagcccacaaatcctgaacccgaaagaaaatggatcaagtcaaaagcaactcaagaattttactgaaaactaggaaatctatactaaaaaggaaggggacaagactaaggaaatttctgaataaatgaatattgttaaattcaaacaaattcgttgcgtgggattatatcagaataatttcgtggtaattaattgagattgtgaccattaacgtggacactttgtttatgagcagggacctctacagttgattgagagcacagcttcttctctctaccaagtgtgttactgtttgtgaagagcttccttttttttttttttcttttgagacagggccttgctctgtcacccaggcaacacaagtgcagtgacgtgaccatacctcactgtagtgtcagtgtggctctcctggggtcaagtgatcctcctccctcagcctgctgagtagctgggacttcagatgtatgccatcatgaccagctggtattttttgtttgtttgtttgttttagtggagatggggcctcacagtgttgcccaggctgaggacttgtttcataaaggggacagcattggaacatttgtcttcagacatttatgtttcataaaccagaaacatttcagaacaaacttctataggccacagaattgccaactttttatcttgtcaataaaatgaaagacattaaaaaacaaaataaaaatttacgaaaaaaatccaactactgtttattctcaccatcatttcagaagtaaaaagaacaataccaaaacaataggaagaaaaaataaatagcaggaaggcaataattctataataaaagaaggtcattttagctcaatgaaaaatcactgcatcctacttccttttctcagtctgctctggaccaacaagggccagggaccagtgtctaagaaccaccgccactgtgcatagactttgaagcggtacagattttgatttaaagcccggccctgccaatttctagctgtgaaacctggggcaggttactcaacttttctcagctgcgatttcctcatgtactaaatgaggataatatctcactgactatactcatttcctaaggctgctgtaacaaagtaccgtaaactgggtggcttagaacaagagaaatgtattgtttcaacattttggagaccagaagtctgaaatgaaggtgttattttggccattcttcctgcgaaggcactagggaaatacctggtctaggcctcttctctgccttgtggtagtttttgggtttgtggcaccataactcccatctccacaaaacattctccctgtgtgcacctctgtgctcaaatttcctgtttttatgagaacatcagccatattgaactagatggaagtagtggcccaccgtattccagtgtgacctcatcttaactaataacatctgcaacaattctatttcccaataaggtcacattctgaggtactgggggcaaggacttcaacatgtgaattttggggtgacacatttcaacccacaacattgaccaatctctggaattgttgtatcaaagtcatacacaggataggctgaatatattagaaagtacctataaagcatcagaaagaaaaataagggagggttgtttgtttttaaaaaacaagttataattgagaaatttataatgtagggacagtaagaaatttgtgtaaggatataggactaagaagtagtgaagataagacttcaaatacattcatttaataaatacatattacatataacattcatttaatgtgtacatattatgtggcaagtcctgttctggtgctggagattcaaccaaggacaaaaaagacaacgaccctggcctcatggagcttacattctagttgggtagaggagcaaaagtaaagaaatgaacaaagaactataaaatatttcatatatacatttaatatacaatatttagtatataatgtttaagcagagataagtactataaattttttagaagtctaataagagggagagataaatggaggaatagaggatgctgttctatacaggatgtcagagaaatctcttcttccaaggagacacttgagcagatggaattctggctgcagtgaaaggagcaaattccaagtgaaaggggagctgctgaagggagctgagcaaggagtgttggtgtctgaattttgttttaaaaacatggctggctgctgtgtggaggaagggtggcggcaaggcaagaatggaaacaaagaaaccagtgaggaggtggttgcagaaatccatgtgagaaatgatagtggtatagattagggagatgagggtggagatggaaaaaagacagagggtacattttgaagacagagttgacaggatttgatgatgaataaggcatggggtgtaagataaaaaggagagtcaagaatgactcccaggtttttggccagagcaactaggtcaatgattgcgccatttatttaaatggtgcatactgggagtagagcagattcaggagaggaaaccaagagtttagttttgagcattttaaatatcagaagcctattattaaacaatcaagtagagatgcttagatgtggtatgcagctggatataagagtctggagcttagagcacagattgagactggagatctacatgtggtagcctttgatctacagatggcattttagtcttgataccggatggctagccttgggagcgagtataaaaaagaagtctaatgacaaacttggggacactcaaatttaaaatatcagaaagcagagaagcgcccagcaaaggagacstagaaggatagattagtgaagtaggagaaaaaccaagggggtcttgataaccaaacagagacaatgatcgattcagggaagttgtaattgattctgccaaatgctgggaatggttgaataaactgaaaactgtgcaccggatattgattttgtgagtgacaatgttttcatttaccttgataagaacaattgtagtgggaagcctgattgaagtcattaaaggagagaatgggatgtgaggaagtgaaaacagacactaatgttttatgttacctgttgccgcaagtgcttagaagcagtggatatgagatttaagagaacaggtgctgtggtcttagacctcagctattattgtgactgtgccatctgttagtaagttacctaacctttctagccagagtcctcacctatacggtaaagataatagtacagaccatttcaaaaagttgttgtcaagcttaaatgagagatatgcataaagttttgtatattgtcagcccataataagtgctcaataaatactagcaccatcactaatttaagcaaaatattgatacagcttcaaggttctacataattcattatgtctgagagtaattgttggttgaagtggtaattatgaaagaatatgtataaaattatgattattcgtgacaggggaacagagaaatgctacaatataagagttatcatgactcatatatattaatttttcatggaatgatggtggtatagccaggtagcaggggaaaatggacagggaagaaatggctcctgaggggatttgggggctaaatgtaggtggaaggcactgagaagacttcgagaccaagccatttcagataataagtggatacctacttcagacatataggaagtaaccattgatcttgtagctgtagttatcacctgttctttgtttacatctgacttttcttaccagtttagaagcacatgtcttactccaccccttacctccaattatatttcttacctctgctcctatagtacctactattaagtatggtcaggaaagacggcatctcatccatgcgtattccagaccttctagtaagacgctcagaggaaaagctaaacaaagagagaacagactgtatgtgagcaaattaagttggccacagagttattctctggaaacatggagctaagaaaatctctcatgtctaaacctgcatatcctgcaacattacagcatcaccttgtcccacagagggttacttctgatggctctcaaggaatgctgactgcataccttgaagatagcagtttctgatcgggaggagctcatcagatagagacctcaccagtggccaaatactaggttatactgacttacggtaggagttagcagtggaacgttcaagacagagatacctgtcttcctgcttggcacaccatgacttagtggctgtaagtgtatagttacatataaaagttcattgtttttatgggttttgtggtaggagcttgtttgaaaagggtgagagaagccaagatggtctcacagtggatagcagacatgttgcaaatttgctttcttgggctgatgaatttatttgagtaatggtggaagtaaagcagagagaagctagtgagctgggccagcagcccagcacagagccctgggcccttcattctcttatagaaagcccatctctggtagagagatgttaggtctctttagggctttttccccttcactgactggcaggttagaagactccttagcacagtaaaattaacatcttaaaaggtagttgagggagaaggtgtggcagaaattcattttgtcaaaggaaatacggcaggaatgagaaccatttgggggtacatactataaactaggcactatattttmttgatattctccatttagtcttgtgatgtacgtttcaatatacccattttacagataaaacaatctgcgttttagtaaattagtggcaaagacagggttaaacacaattctgttgaatttcaaaacttatctttttatcctttctactaaaggccatagtaaatcagtctgctctcattgttcatctgcctctagcagtttagtgtaaaacactacttggggccagataatatatatgagtctgggctttgaaactaaattgcgtggagtccattagagctctgccacttaacagatatatgatcctgcgtggattagttgacctccctgaatctcagcttcttctctgcaatatgttgctcatgatagtacttaccttacagggacattttgaagattgagtcaatacatgctaagcatttagaatactgcatggcacctaaaatgtgttcaatagatattagctattattatccaaaacatattttccagtgctgttattcgatgaacctaaaaaggttaaactgaccttgtcagggagggaacaaaaagctcaggcactgctccccatgaagcctgcctattaatgatttttggtcaacagtactgtttatgatttccagtcttctcgtttgctgggctttcatgctccagaggcagcatggtagaatagaaaggcactgtactttgccatcagaagacctgggtttgggttcaagttcaaatcacactttgtgtgacctgggcaagtcactttatctttcttgccaggggttccttatctgctcagtaagggggtaggactccctaatctctaggactccttgcattccataaattcagtgaataccaaayaaagccatttagtctctctgatctctggtgctcatctgtactgtagcactcctgataccttctttagtcactgagagactcagtgagagtgaaagtgtttggtagactgtgacaggctatgcaaatataggagttgatccttactattaagagctttaaccctgagtaatacgccttgctgtatgtgcattggtgcaggggctttttccacattttgttgtctttgcctactcctcactgagctgggtggatccaccttaacaaggtgtaggggaacacgagcagaggatgggggtacactactgatggtgggaaagcatcttattggttaatagtggtacatcccaaacaccaattactgtcactgcttctaaggctgatatatttatcaggatgagttacaaggaaatatatgtacccagtgagcgagaatgctgcatggtcaccccctgtgatgtaaaatatgagaatctaggaggggctgttttataattcatcaggttccgctagtgagttctgtcagagtcttagttataaaggcaagtgtgaaccggacagcagacaggagaacctggcaccaaggagacggagaagctgcctttggtgcctcctgcctcctccctgctttgttccaataattttgtgctcggtaagttcctggctttgcagctaatcgttgttgttgaataagcttggcaaacgtacccatagtttggaataggcacttgctgtcagaagtgtgtgtcagtgtttgggctcctgacaaattccacaatttccttttaacgagcaaaatagcttaaaagatgaaagaaaagccgatgaatcaattattcaccttgatccttggaaggctgctttctttggttgctaaagtttctcaggtttcattctatcagtttcatttgttgggtgagctttgaaaaaaacaagtctctttgtcacgaaattgtttttcttagctgccaaaaggaggtatgtacagggtggtttgtccatccccaccccactaattcactctcctcagcaatcggcaaatcttaaaacagactgtttgcctggtaaccagctccaactgagctgaacctgtgcaaggcaagattcaaattgcaatcttttgtgtgaacagaacagaggggctgtgaataattggcattgtggcgattattgtgaaactcagtatggtggtagtcctgcgttttgccgggatgggatcagaatccaatgagatttgcatttggcgtgcctgttgatgatgtgggagagggagtgaaagaaaagactagatcgttatggaaagagctgtacgacgtacccgcaggacggacaaatgcagaaggcatgactgttgtatttgcatgacttgtggctggctgttttctctagtttcattatcaccattaacaattacctgaagctgcattttggtctcatttgggtgggctccgggtatttgctccaggtcctagctccaggcgggatgcgtgctaactcctggtcagctaactataggaagtcatttcctcttcagaaggaaagagaagtgaaagctgtaccttcttagactctctgctgtgttgttttgcctctgtccaaatctcatggaaaccgacagcttgacgtacttttttttgcaatagcagatttaactctggtgtcatatggcatattatatatggagaggagtagcaaggacatttttttcaaatgtttcaagtgtgtctagcttgttgacatttgctttatttcactggcaagtagctactgtcttctaaacccataattgtttgtccaaagtgtttacctgtacactattgtaatttctctttacatgtagaatctgtagatgtgacaaatgtcctctttaacctcaaagaaagcaactcattttagcatctctttgaaaaaaatgtatgcatttttttcaccaaagacttagcttactcattgctttattttttgcataaatattttggttatcggcaccaccacacttccaataaagttatttctcctttcttagtatactttctgattataccaaaaacttggcagatttgaaaatggaatatatattttttcaggaacacttttttgttcatgcttcttttgtccataaatagcttttccatattttccgtttctctgaataagttctgcttaaagagcagaggagtgatgtattgtggttggcacttaggggtgtgtaacctgagacttggtttctaatccacaagcggctgccccacaaggggtctgtaaaatgtcttatgtttggctcaaagcttctggatagagcaataatgattaagataggagattcagcaaatcatcacagatacaaatgaacatctgtgtttgatgctccagccagcctatgacattttttaaagcttaggtcacacagctgaagggtcctaaaagtgttaatataccttaatgccaagaacaaggtagtttatttgttgtaaagtacctttgagctgcactgtacattaaattttttaaaattacacgccacactccacggtttattttacagcagtatctgggttttgattcagtgtggttttatggaaaaataaacctatgtaccaatctcaacaaactgaatttcttctcatttggtggtggtttttctattttctccacccacccrtgatgaactctatttatagcaacaaaagaaaatttagtatgagttattcccaattaaatttacagcaaggcaaatataagctgtgacaagaaccctcttacaggacacatacacacaaaaccatgtctctcaaaacaggattaaaagcgaaagaggcaaatgttaattttgcctacgtgacacatataatttcctttgagagggtagggaaggtggcaaaaaggacaggtttaaaggtgctgttcaaagacctggctcagcaaggtgtaaatggaaagggcaggggttctgtgtccccaaccaagtattattgtctgcacctcacactctttatctgtaaaatggaggaggggaaaattaggagaattaaaccaaattgatgatgtaggtaaagcaaatagtatactgtttagcacaaagtgatgcccaatgaaaggtaattattattgttgtaaattgtattttgtcaaatactttaactcattttgatagatgttgattttgaaagaaattggcatggtaaacaggaagattatacaattttttaaattaaccagatagacttcttataactagatcattttgtgtttttgtttttattttggaaacttagtaaaaacagggttattacctttctgttcacttttaactaattcctaggatagtatccaaaatccttacataattattcaaagaatacattttatttcaaatagagaacatggaaataaactgatgccaaataacatatcatagctttccacgttatttgccaaataacaactaggccakaattccagccctaacattgtattaaaatacctgacaatactagtaaatatagtttatgatgtcccaggcactgtgctaatggtttgacaagcattttctcatttaatcctcctcactaccctaccaggtagatcctattttgctttccgttatcaaatgaggaattgataaagaaaattttgtttaaatatactactaatgtaaattggcatatagcagtgctaggatttaaacccacgcctgtctgatttcaggatccacacgatgaccaacatgttggaagtatgcaatagagtttgcccagctcttcacacttccattttgggatcttggccccatatctgctttgattcctctcctcatatgtttaatccctctcagagtttagggaatattttaaaaatgaagttggggatttccttgctctcacttttggtctatgccagttaagatcacattttcctgagccatctctcctatttttaccgaagtataaaatttgatataaaaaatgaaacataaaaagttcgtaaatctaccaaattcaaggcaagctctgaaagttaccctaaatcagtaccaccctttgaactgagcaaatttccccatatctgtggctttagaggaggctgtaggccaagaggatgggctcacttagatcttgctctctgtcccttctggatcacattcagggtaaataggacccaataattttttccccaaacattcctaagctcactttcaagaggtgtatgatgtgcctccccaacccgttgcccctgagtctgaggggaaaccaagagccttctatttgcatgaggktaggaaatagggcaagggatggatgctgtwaatcactgcttgcactcatgagctgagatgtccacacatctgcatgaaaggtcttttgtagtgcaggaagaaactatgaaaaagaagaagggctagcccaggactgggagcttctgcttatgttcttgttctgggtcccaaaaatatgagtcagcctaccttgagttgcagaacatttacttctatttcagagtagtaaactaaaattccactgcgttggttttgtggggcttttgtctgtttttgcttttgacttttttcctccattaacccaaaagaaatcatttgaagaaggaagtggtcaaaacaatgatgatctcaggttcaagggaagacattggcttttctagttcagagggcatagtcttactttggaaagcaattttaggattggctggattaaaactgtctgccatttgtcttttagggcacttgaaaacagttgcttggagagaccctagctaatttcaggtgtattttccttatctctagttttaaattgcaattgtaacacttagagctgaggactaatagaaagctgcctgaagcatccaagtggaaccctgcctcacaggggaggttccgcctgtaggaagagtcaagtcaaagcagagatggctatcaatgtctttgtgtggccttatgccattactacagccccttctgtttagtgcatcattctcccaatagttccttttcatcttatgtcacattggagacaaagaccctcctaaggagaattaacagccaggagttctaagcaacaaatctttttgtaattactaagaaatttgaggtttgggggattttgtttttgttttttaatgaaatgaaagctattatgcaattaacatgaatgattttttccttttatttttatttcttttagtattattttcacaaagtagttttctaggtgggaagacagaatgcattgttggaagtattccctactactaaaccttgcaactttgctttccttagctataaagcaggtatagcaattcctgtctcaggaagttgggaagatgtaaatgagataactttatttcccagtattagctatgctctcctccatatgaaagtatctggcacagtaaatacttaacgcatagtatgcctacattaagtgtttacccaatctgaaaatacagcagttaaattgatgactctgtgaagactaatgggtgccatatttattttgcctggaagagttggtagtagggatggtgcaaagaggtaacaaacaaacaaaagcaagacaaagcatgcctttagtggtagtatctccattttatttttagtttcytctttatgttttatttatcatttgaacttttaataaacatgaatcattcatatgattataagaaaagggaaaacacacttttaggaaattaggggagaaaatagctgttagtatattgtgaacatctaactctgaaagagtcaagccaaatatcaaaaaaaatgcaaaatacttgggaaagccatgtgttctagtcagaataatccagattaccttgctttgttcggtcgttttctagttcatttgtctattattagttatttattaagcatggaccacgtgccaagtgctctgctgggtgatgagataacaaagatgaaatattttaatctttgaactcgaggagtttataatccaagggacatggataaatgggcccttagttgcaagtgtgattccttctcagccatgacagtaacagataaggctgctttccattgtaagtagtgccaagcttgcaaaacaaagtagttttctaggtggaaaggcagaatgcattgttggaagtattccctactactaaaccttgcacccttgctttcctttgctataaagcagacatagcaattcctgtctcacaggcggttgggaagatataaatgagataagtttatttcccagtataagctatgctctcatgcatatgaaagtatctggcacagtaaatacttaacacatagtatgcctacattaagtgcccacccagtctgaaaatacagcagttaaactgatgactcaaactgacttgctcaacaaagggaatatatactcatagtggtgattataacttaaaagtacatcagtaaagctagcttcaagagatctgatcctgtagctcagctcacaatattgttaagaaatcccttttggtcctgccacactgcctgtctttgtgttagcttcataccaagactaattgccctcatggccccaggacagttgccagtgactcctagacaacttgytttcatagtcacatccagctagaaagagatcctggcaatgattcctagaattcactttgaagagactggcttatatccacccctgaacatgagaccaaatctccagccccattctaaagcttaggtaggataaagacagtctccccaggacattatgagtccttaactgaaatttggcagctgttgctgttaggatgggatggtggtggggaaggatgctggaaaagcatccagcagccatctataacttgtgaaatgtacaatacataatgtacaaatgtctactagagttagtacataacataatggaatgaaggccaagcatatgatggtgcatgtccttaaattggcttccaggaagagtaggagtttgctaggggagaagaaagaaggaaaggatttgaggtagagaaaaatgctctttgcagtcacaaaagctaatgaagtaattgttcaactcgttgcctatctttacgttggcactattgcagaaatcaccagacagccagaagccatgtgcccagtagaataaggaacagaaaacctaaagtatcagtctcacaaaaatttgttgttgaaaaatgaccgttgaattataagctaaaccacagtcaaatgttctgattctttacaatgtggatacagatttggagtcaatcaatgtgaactttaaaatatatgttaccaggctcaagaattattgtattttgaacaaaatcatcatcatcttcttcttctcctttttacttctgattaaacctgctcagagaagattaatgacttatgcagtaactcaagtgtatttggattttgatatcatgatgtttgtgatactaaaaaatatgataagacaaataagaatatatttttgtacatgtgtttgctaattgtatggtgtatatcactttgcgaatgagacatagagtaaaatatttgttaacaaaatgtcaatgcttcaaagaaaaattagacttcactctgatttctggataattcaaagtttatataatttataagttcttcagcctttggcaataatcatttctttccactgaggaagtagaatagttccttcattaagattgtacttaatgggcttggtaatagttttccgctaaaatttctgactccaaatttaattaactacactttggattgtttttccacttttacagcatagaagaggaagtgacaaaactgttatttactttctatcacaagcgtgatcatacagttcacaattttctggcatccaaatgcaatgayaaaacattcttttttcactcatgaagcttgtctcagtgctgtcaatccacctacctggtgggtatgctcctaaatattcatttttctatctagcttctttccaaagaacagacaataatagcaataaacagaatcaaagtatatttcttcttgcctcttgcttctggtgtataaaatctgttcataaaacctgcatccaggcatgagtaagtgctcccagcctagctgtgtcactgaggagcccaagacttctgttttcactcagaaaacatgcttgagtcagagaagggtgcagtgaccaggtaggaaatgcttcccagggcactggcttcttcctcttcagattagacagttcttcagtgcagagaaagaagcaactaaaaatagtggaagggtgacagataatgtttatttaaaagcacatatgtcatatgtcatataagcattaaaaggtaccattattactatggcataacttcatttccccatagcacaaaccagataaaatcttctttgtcttgttttgtggcttccttgtacaaatagagaaactgttccttggatgaatttcttaccttatcagtaagtgtgttgagttcctgacaaatagaggatgccaaagaagtatcaaagatgccagcactaatattctggctgcaggcagtgcttctgcttcttaaaatattgaaatatattcttgttagtaaagagcttctaccctgggcccgctgagtgctcctctacaagctgcttcacactggaacccctgaatcccttccctaggactctcacacatctccatgattgagcaactaaagcattaatacctggcacagctagttgtaaatattttgacatcacttctatgtaatactcatcttatttttaaagaacttacggctacaattagggagaataacatttagacacagaaacaatgtgtractaagtattaagatgtttaaggcagccatgtatgagtttttaaaaagtggtaaaggagatatttgaggttgtctggaaagacaggtcagggatttggatagggcagaggtaaaggagtaaaagacaatggcagaatgtacaatttttaaaattcatttacttaacaaataataacaaaattctccatttgtttactgctgctgtgtgcaaagcactgaatacatgttatctcatttacttctcacagtagcactataaaaatagaggagaaaatgaggcttgttcacacagttggaaagtagcaggacagcacatatgatacccaccatttcccacaatgttcaagacactgtattaggtgctggcatggtgaatatgaagatgtatctttctacttgtaagggccagtagcaaacccaaggaaatattggcagccccttaatcgaacaaaaaagtgctagtgggccttctaccatcaacaacctcattttaaaatattacaggataatgcattattgtcttgcttgcttcagttgccccactagcaacataaagagtaaaatgtgagccatagggtactagctaaactcattataatttgattatctgatcttccaacattagtcttctcatgaccttttcataacataggacgttagaaaaagcaataaaacacagtcaaaatgtttagcctattgacaaagtgttgctttccatctttaaatggaaactgaaagagcgagcctatttattaatgattctgtggcaaatattgcttttttaaaaaactctccagttatgccctgcacaacaatgagcatgtgtttgtcatgactaaaaattatatggacaaatatatgtttttagtccaaaacataggcattgcctcatttcttactaaaatacctcacagagagttttttttgtttgttttgttttgctttgttttgtttttgagacagccttgctatgtcgtccaggttggagtgagtgcagtggcgctatcttggctcactgcaacctccgmctcccgggttcaagtgattctcctgcctcagcctcccgagtagctaggactacaggtgtgtgccactacatccagctaatttttttgcatttttagtagagacgggtttcaccatgttggtcaggctggtctcacactcctgacctcgtgattcacccgcctcggcctcccaaagtgctgggattacaggcgtgagccaccgcatccagcctgagagtttcttgaagacagggatttgatttcattcatccctatatgcctagcatctcacatgatgcctcaacacaaacacaccaaaaatactggttgataaatgccagctgatacatccttcaaaggaggatggagacaacatgagatagaaaaggtggggaagaatttctgaagctgaactagaagatgatacaggaatttactagatatatagagaagagtattgttaggagtacactgagcaatcttcccaaaataagtaagtatgctcacagagtttgcatgtttaagaaaatcaaggaggccgggcacggtggctcacacctgcaatctcagcactttgggaggccaaggtgggcggatcacctgaggtcaggagtttgagaccagcctgaccaacatggagaaaccctgtatctactaaaagtacaaaattagccgggcgtggtgcctgtagtcccaaccacttgggaggctgaggcaggagaatcacttgaacccgggaggcagaggttgcggtgagctgagatggcaccattgcagtagcctgggcaacaagagcgaaattccatcaaaaagaaraagaaaaagaaagaaagaaggggaagaaagggaaggaagggaaggaaaggaaagaagggaaggaagggaaatcaaggaaggcctcaatgtttctacaacatttttttctcctggtgtcccatttctctagatttccttccttactcccttcccctttatttgtcttaccctccattcattctttaaaactcaggcttcttcaataaataattggcaaagaaaaaagagacataggggaaacacttaaaagtaacaaattgtaagcaatgaacatttgtgtatttcaattcaaacaaaacataaatggtaaaacaagtcatgacaatgagacaattggagatttggacatcaattatatatgtggtgaaaagttattggtaatatttgagatgtgacaattgtattgtgcttatattaaaaacaagcacccttatcttttagagctacacgctgacataggcatggatgaaattatttgcctcaaaataatacaagagagggaaagggagtagggatattgatgaaacaaaaaataaataagcattatttatttattgattaattgtccttctgaaagatgtttctcttcccttcctccccaccagttgggtctttcttgctatatcccaaatactcacagcttatttctttaactacatttatcttattatatgataattatctgttttggtggatcttatcaccagagggagctcattagtaaggacagatttttctttgtccttccattgrctgctcataggaggggctcaatagtattgggtagaaggatgaaaagataaatgaatcgatacagactctacatcaggatgtgtgattcaagcagtgtgggttcacgttgatttcccctacattcatctaattcttaagaaataaatctcaatttatgttctatatacyacacagcatttgctcacaacggaaagccataaatgcagcactctaattaaaactagataattcacacattttcatttaatattaatagaataccacgttgcagggccatgttcttaattaggataagatagcattgtaccaaacccatttagttgtcatagtgataaggaagatataaaggaaaacattttccttgtgtttaaaatttttaaaaattaaattagggttatttgaatctactttttaaatataatatgtacaaagaaatgtacgtgtacacagaaatacatacatctatatatgtattcatgaagatggagtacaccttccatgagacacagcagcctagaatgtttctttatagaaacaaaagtttgcctcctttttatttttaaggagaatattttaatcaaatcacttcatagtagtatactattattggaaatatcaatttacttagattcccttctaatgttaacatgtacatgcccaaaaatttgcctgagaaagaatttgggaatatatctgtccttcagagttcttagttacccacccaggagcaatgcaatgagataaatttattaaaacattcatgatgttcccaagagaacctgtttagcagaccagatggaattgctgggtttttttgtgttttggtttttttttttaaagaaatgtcttcatctatgacaacacaatgaattttcttacatcttaaaatttcatgaatatgtgcttgtgagtgagcccaaaggtattcattttcttctgtggtagagataaaattcctgatattaaattgcaaataaggacaatgtataccaaaacctatcatggtgaccaagaagtattgagactccatatatagagtcaccagtgatgggttttttttttctgtatgtccagaacctagccttggcctgaaacctgtgggtgcttggtagatgtttgttgacattttttcctgctttcaccttctcctgggaaccttgtcacctaccaccacaagcatccactctatttgtaacacgtagaagaagcctggaaatgataaaagcacattaactggagaaaagtctacagagtttggcaagactcttgagaaatgcagaggtgaactagacatctgtttactcctaatcctcatggaactcactggaatatttatgatgcctgtcctcagctggataagctggttgagttaggtagatgtgatattgcacccaccacagtatacatcactgctctgagagctaagagaccaaagaatttaaagcatagctataagattaaaattattttcagataatcatcttttcaccatttgggtcaagatttggttttaaactatctttccctcttaaatccatagctcttcctttggcttgtcctaacgaggaactgcataattgcaagtgtttgctctttcatttattcagttatctagaaagtattcatttagtgcttactttatgtttagcactgttctgggtgcagagaaatacatgatagcttttcatgtttgtttgtcttaaattttttcctttgtttttcagggttggaaaagttgtctgttcctctttatttcagggcataaacacccttgtggtcccttcaaaatagagtcaaaacatagcaatcaacatgaaaatagttaaacttgaaaatcataggccattatattaagggtacaaattatgcttcgtttttaattaagtggacctaagtttgaaaggtcaagggatccttctgtttataagagggttgtattcttttgtgagccttaattgtgtattgcatatctataatatatgtatacattggcatagaaatgtacatgtagayagaaatacatacatctatatatgtattcatgaagatggagtacaccttccatgagacacagcagcctagaatgtttctttatagacttttcagcagaaacatactcagtatcaatttgcttttatatgtggccttctgaattgaaaagttattgctagaggtgcgaatattattttgcagtaaattaataggaatgagtaatttgaaagagtgtgagtagggagagggggttcatgaggagagggaccaggactgttttacccactactgtattcctgggacctaacataatactctgcctggcacacagtagcaggggttcagtgaataaacagatcaattagtacaagctcaggattgggaaaatattccaatagagcattttgatgggccaggaaattctttggccataaaataaagaagaaatttttgctgcctgtagatttcattaaactcagcaaacatgtattgccttctgagttttaccagggactagtaatttggtgctgagcgaataactgttcctgggctttagaagctcatagtctatcataaaaaaaaaatatatatatatatatatrtgtgtgtgtgtttatatacacatatatatgtttatatacacatatatatgtgtgtttatatacacatatatatgtgtgtttatatacacatatatatgtgtttatatacacatatatatgtktttatatacacatatatatgtgtttrtatacacatatatatacacatacatatatacttatacatatatacatacacatgtgtgtatatatacatgtgtgtgtgtatatatagtttttcttccattttattgtaatttaaattacagtaatagcatatgagtacaattatattactgttaaaaaagtacagaggtaacccagagaaaacagtgattacctctacttagtagggctaagaaaaacttctctgaatgtctttgcagtattttaaagaaccaaggctatcccaggtagaatgagcagcctatacaaaagtatggagctatgaaacagcaagatgtgtcctgggactgatagctttttgttcttaagctataaaatgtgttgtctttgcagagaagagtggtagatgagcctggagaggaagaattgaaaatagattttcttggcaaattgacaactggatatttttatgcatcagtctgaaagccctccattctaccttgtttctacataaatctgaccctgcttcaatatccaccacgtctgtgatgccagacatagccattgcttccatgaacatcagcctgagtgccctcattttgtttgtttggtttctttgtttttgtttctgctttttttttttttttttttttacttcatttccccagaaaattgcaaagtgactggcagccaggggccgtcatttccctcttcctttaatttctttttttttttttttttttttttgagacggagtctcactctgtcgcccgggctggactgcagtggcacggtctcggctcactgcactctgcctcccgggttcatgccattctcctgcctcagcctcccgagtagctgggactacaggcgcctgccaccatgcccagctaatttttgtatttttagtacagacggggtttcaccgtgttagctaggatggtctcaatctcctgacctcgtgatccgcccrcctcggcctcccaaagtgctgggattacaggcatgagccactgcgcccggcctcttcctttaatttctgtacatgattagtagcaagacctagaccaactagaaggaagttagccacctctgaagagaacatcactaatttccttagcatggctttctgaattgaaaaggagtttgaacaagctggctgcatttttggaccaactaccgtgctgagacctttatattcaggtaatgagtatttgtgaagctcacatgaaattcctcctttaagactagaaaacaaaagttcaatccaaaccttgggatcggcagaaataaaaacagaattgtttacaagtgaatgagaaaatctattaacatcatgccagctgcatattcaccaccctccaggaatgcatgtcaatctgaatgtcatatccttagacagctataataagcgtaggtaggacagagtttgcttatcaccattaaatggtaataagtccatttcaaagggcaaatgaatgaaaaatgcacttgaaaactcattggatacactaagaaaaggttatctaaacttcattgtagacagaagacaaaagcatattttaagaaattcttccttaaaataaatatcctttattcatatttttatatatttcattgtcttggcttatgtctatgaatagatacaactttaattattcaaaggcaaacatgcctaaggaaagataaagcgttgaccgtatatcgcagtttgcccaggccagttccggtgtatgcctgggtttggaagaagatcacagactcaaggcaaatggggctggaatgagagtatggtgttgtttaagatctgttggagagggaatgaaagggactccattctttctctgtatttagaggttggatgagaactagcacagaaggccaaagcccaggctttgaattttgcccccttcacttaccagcattgtgactttgggcaagtcatgggacctctcttgggtatcagttcttttcaactcatggtggagtcttgtgcttggtacaaggatcactttattagatagttataattaagctgtttcaagaggtaaccacgtagggaacaaaagtctggaaatcttactggataaaatgagttaaagcagtggtccccaactttttggcaccaggaactggttttgtggaagacaatgtttccacggatggggtgggtaaggggaatggttttgggattaaactattccatctcagatcatcagtcatcgggcattagattctcacaagaagcagcaacctagatccctcacatgtgtagttcacaataggctttgcactcctctgagaatctaatgaaaccacrgatctgacaggaggtggagctcaggcagcaatgctcactcacccaccactcacctcctgctgtgcggcccagttcctgcaggccatggacacctaccagtctgcggactgggggttggggacctctgagttaaagaaaccacggctgcctagcttcaagggataagaacaacaaatacaataacattcaaatacaagacagcctttaaagagataagagattataaatttattttataactgcaaagggcagaagtagatctcatgtggtggaatgaaaatagttctgtataaaaaactattgaataatgagatatatctagcaaatggaaggggctaatcttgaaaataatgctagtgaagacaggaagcagagaacttgacattcatgtttgtaaaaaaaaatcatgggggagatagtgggtcaagttkgagggggcctgagaaaaattcccgtggaatgtgatagtcctttatttatcttccaattcccatgcacccttgtatatatcacttcttcgtgtttttgactcctaactgctacagctgatagagaattccaatctcatgctcctattgtaacgcattccccgttctctaaaaaaaaaaatctcaagaatctccaaagtggtagtagaaattattcatttttccttagacgagttgcctagtggttgacaaggggcacgtctgatctgcctttsttttctctagaacatacggaatggtttgaatatttattattgtagttaaagtaacatttaaaaagataaaagaaaatggtaagctctatagtcttgaaattctctccgatctctcttcctttgagcttgcttaacccttgaatcacaayatctgttgaatccctcaggtcatccctgcagagggagagtacataagagataatctaatatttagaaagtataacccccatttgtactctatattgctctatgctgtgacactatgttgtagttgactgtttgctggtttaactcttatagcataacgtaaagcccttatgaccagatgatgtgccttattcactgtcgtatctccattgcctagcacactacttgacataagaaggcaacccatgcatagttgaagaataaaagacagcccattgcttctctcctagaactaactctaccagcctcttctatgcaagattccccctcacaccccagttctattttacggtagcttggcacctctttctaaggcttcttaagccttctctctttcaagctgagtaccagtcatctcttacaggcacacacttcatttttccacacatctaaagtttcaaggcattctatttatttctttcttccctaacaatactttaatattggttgattaatcaagtgctacatttctatttattgagcacttgctatagtcaaacactctgctagatactgagaaattttcagccatgcaaaaaaatgtggtctctgtcctcaaactctagttgaggtttaagatacataagtagaatgaaaaaactcatagtgtcttccaggactcagttaaatgctaaataaatgttagtgctggcttcatgagctttcagaagaggacctttccagaatgagaaacttggaatctttaggaagcacatagacatcagttagcttttcaaaggtaaaatgaacctggatcataagttagacacacagacattttaaggaagggtgatgcactctttaaccttatgcttttaactcaacaaatattcattgagcatctgctgtatcccaagcaccaagctagagactagtactgtgagttttctgaagtcaagtgtggtttcgttttccctcatttaattccaaaccatccatgacctcattcattcctgcagctttaactactacctcccagtgtacaaaagccacccaactctacctgtccacccctcagattctttcagtaagtcaaatcttggttcccatttaaaaaaaaaaaaaagtgaggtttgacgattctgctctacccactctctaccagccattcccactcccctccacccaaaggcatcagacaccgcgaagcttacaaaatatgcagacatttaattccttgcaactacataacctctctagtaaaaaacatgcttttaagtattccttcacaccactgctgcctatttgggactggagagccttgttggcttatgtggaccagcctgcaggatgacagcctatgtgtcaacagactcttggtgttagtgaagacaatactattttcattcactgaatccataacatgggccaggagaactagatgctttctgtctacaatagcttatccttacagtaagctctgtaagagagctatcatctctaccattatataaatgaaaaaacaggtcacagaaacagctcgcccaatgtttcacgtctagtaagtatcaggaatcaggatgaaaacccagatcagtttgattccaaatgtgacactctttttaatacattacaatgaaggcagattaatagttttcagtgcctcaatcttatttggaatgtagggatggatggattcttatttctatctgcctcggaattacaatgcccttgacaactgaggcttccaaggaaaatcaacagccttatgtcagtatctaggaacctctgaggtattcttactttgctgaactataggagggaaccaggcattaaggataatagtattaccaacccacagatggcttatggcccaggtgacccctgagtcagagcatacaatctgcaaaggaatgtctggcggaacaaaaccagtgaactttcattcatttattcattcagttaatacttggcaagcttctactatgtgccacacacacattgtatctgcaatgacgctgcagatacaatgtatgtttttaacagggtgtcttgccagacctaatacatatttaataaaccacttgtcttgggaatgaatgtcctttgcctatgtatagagaggttttcagctgcaatggtgctctggcaggaggagaaatacaaacaactcttaacctctgagataagattttgacagcaacgtggtatattatacccactgtgagcagtccttgaatggaaaaagcaaaagcacattgggaattagacagtccagggctctactctcagatctgacatttaatactttgctgtataatcttaaattattttgtctctaggagcctcaattccacaactgtaaggcagggataataatgcccactgaatgggttgtttactcaattatttaacatatatttattgaacattaaattagtcaggaaaatagatagcacctttattattttaagcagaaagcaatgtaattcagggtaataatgtgcttagaaattgtttgaagactgctagttaggaatggaggcagctacaaccaaatcaggtaacctcaggaagccgtttcctgagccacagtttgttccagccctgaagctagagaccaacagtggactgtggagtctgaggaaactgtaagatactgtagcagtgctgagagccacaaaatcctgtgatcctgtgccagtctgctacttgcctttaacatcctggaacttaacagaagttactgtggttgagagaatctaaactgcaattctactgacaaaaggttctgagcatatagttctcgggcttcctgatcttgtaatacagtgggaagcatggtggtggcagagttaaggaacagtgcagaggaccagtagcaagagccagaacaggcacctcctatgtgccaggaacagttctgagagtacagggataaatagaagagacaaatattctcrtgtggatcacatttaattgttggagattcattgagttaatgtattgatgcattccatagagccagaattatagcaggttccttagaagtatttgttcccttttttaaagttctatatattggcccaagagaatataacactccgcctcctctccatgagatttctgacaaggtaaataattctgagattagagagagaagagctgggggtcgtgtctttggggccaaatagtgaggtttcaatacagtgcttgctttttgcagatagagccaytttcaatctgtattgactttgaaagacatttggacctgcctcagagcatgtattctttccatagataattcaggccatctttgagtctggggtgaaagctgttttgagcactgcagatgcccttgtcattattccaagctgtgggctacagtgggtagacatgaactttggagtcaaacaaatctggctgtcctagtagagtcataagtggcaaagtactttctttctgctgctgtttccttaccaaaaaaattggtatttaaggtagaccatctttgaagacatttttcaatacatgtgtatattaaatgcactccaagtatattaaaatacaaatgtcctatagagatacaaacattgcctcttcacagtaggcatgaggatgagagatgaacatgtcagggcatgtgttaatgttgtcatttacatgaatgattcattcgctctgtcctgatgctttgtcagtcaccttcatatctgcccccaataggaggtcactatgtcttgatttctgtcttgagtcggaagtgtaaggtgtagcggatttacttgaatccagcattgagggagccttgcagtgccctttggagtccagggtaaaagctgtcttgagcactgcagtagcccttgtccttattccaagccgtgggtcacagcaggtggacatgagctttggagtcatacaaatctggctctactattagagtcataagtggcaaagtactttctttctgttgctgtttctaaccaaaaaaaaattaatattataaaatctaacttgctgtagcagcatgaggattaaatgagacaaaatatatattatctggcacatagtaggtgctccacacacgttaatttgtttacccactaataatatattgttgtagatatttcctttgttatttcaatttattttttatctgaaaaatgataggaatagtagatgctttttacatgggcatcctatgcagagtttgtctccataacaactatataaatagttattatgaatagttatctgaataataattatattctcatctaatagatcctgaatttaagcacaagagaggttgaataactcacccaagatcattgcactaattcagagttataggtggaatttaaatgcaaatgctttttccccagagccagcacatcccccacagcacaaggttgtctcccactaacctcgggcaaagcaggagaactggtatatttggtgtttgaattttctgttactacaagcagagcaagcaaagggcatcatgcaaagaacatgatgactggaatcttaaaaacacatctttgttgtagagtaatatcagtctgcagggttgttgttcacaaaacttagtataatctccaacactaagcaggtgcttgatatagggttgtggatattattattatggggggagtcagaagaagaagtgtacatatggggagagatgagatgagggacagaaggagggagaccaagatgggaggagggagagaggtcaaatagtacaattttatcaactttctgtttatctttccatcacttttttccatcagccacccccttatgtacctcaagtctttctccttctgtctatactgccttgataatttttatttatgtcaccttacatgttagtgtgtgactttatctatagtcacatgggcagtgttaccaaggtgacgtattatatcatatgtgcttcttgtagaaaatggctataggtaagtgtcctaaacattgttaaagaaacatgggaccatccataaaaatatatgcacataccacccctggaggtagcagctactggactcaggctgatggtggctgcgcaggaatgggggttcagtggcatcaaacttttcactttttgggtagccaccaatgtggattttgttgtaaaatttttaatttttaaatgttaacccttgattcatatttctgaagacactgtgaaataaaagggaacataattgtgggtcacatatggttggcagtctgctgacttatgacctcttccatagcgtctctgtcacagaatctttcagattacatgttattacatgttattgtttctgtgtattcttcccactgggctaagagctcctaagggctaggttatgtcttatttttcaaaaatmagagacacagtagatgctcaaaagaaaaaaaataacaaaaacctatccttttgcacattttctttttcttaaagtatgaccctctatttaccctccagaacaatcttttcgtatcttagtcttctcagctatacaacgtttatttgtaaagttctagtcrtcagaagtcacagtgcttaagcagatattccagtctgggacagaacctccaatttaggattcagcaaataatagcattgagataggcactctgagggccacaaaatgaaaagaatgacatgaccccttaaacacttgataatcaaatgggctgtattttagaaacaattacataacaatacaatttagtacaagatcaatacaatataatacaatacagtttagtatgcaaatgggaattcaggaagggcgtgttcttatagtgtgtggattaaagggcaggctctggaggcagactgtctcctaccaaatcccagctcagctgcttacttagcctttctgctttccagcttccttgtctatatcatgagagtaatccctacaccaccagggttgcacacaaagaaaggcagagccccattgacatgttagcctggatgaataagattgtaagaaaaccttacaggccaaacctattggcctgccaggtgagtagccttataggacctgggggaaataatcacccaagttttccagaatttgactgaaagattcaggagtaaagaagggtaaaggagtaagcaaaaagagatggagtgcaattgtatgctttatgtatgggcagagaggattatttggactcctgcagatgctctggtctgggtgtggtccaagaatgctgtctctctctccctcaatctctctctctctctgttttattaactattaactaatccccgtgtgtctcagtttcttcatctgtaaaatgggataacagtacctaccttatagacttgttaaatgagttaacacaggtaaagttcttagaacatttgatgacaaaagtaaatgcttaaaatatgttggccattataatgactgttatcccataatcattgttgtattccttatgtgtatcagaaactacgacaggcactgagatatggaagtacagaatattatgggcagccaaggcaatacaagacagtaagtgagagtaccatatctggacaggaggacctggtttcagatctgggattcttcatttagtttccacctaagtaacctggagcaagtgtctacttctgtaaactgggtgatgctactacacaccacaggattgttgggagaacaactgagataaattgctacatatggcattcagtatagctcctggtacattgtaaatgctcaatactagaaagagtgatgaaaccactagagaagtggtaaacttctttaaggtgcttaaaatgcagaaaactgaagagtatatgcaattccagggctttccaaaagataagctatttttccaagttcattgttacattgctcaagcagtgttttcaagtactagagcagactgtgaataggaaggtgggtcatgctgggcaaaagtgaattttactaagctaaaagcacttattgtttcaagcatgaaaattcattgcaaatcatttcgcttataaaaaaatgaaagtcaaatggtgtcagttacaattgcaaaatatactttagctactaagaataactgtttattatcattgtcattctgtgaagcagagaacagacttaacctttgatctctttgctgacagttggatataattaacataattatggtttggactgatcatttttggcaagaatttttcttctctcatctatctgttggagatttagattattacagtaaagaagcactttttrgaaataataaagtctctatatatttgtttccatccttcttaagaaaacaagaacataaaaatgtaatttttcaaaaagcccattagatatagaaagtatcaagtttaaaatctcttaggaattcactataagcaaataagaatcagggaacattatgaggctggagtaaaattaaaagatagtaatagaagtagctaatattgtgggggcacttcctgctaagtgttttccagaatttagctctggtatgcccataaccatgcagccaagactggtttggctattatccttattccacagaggtcacacagcagagccatgtcttccttcctctgcagccatgtcttctttgatatgtgtgtgctcatgaaagaaatctgagtctattttttataggcaactattggtgttctcttggcccaatgctttggtagcaagaagattgttaagaatagacaatataggctgggcgcggtggctcacgcctgtaatcccagcactttgggaggccaaggcgggcggatcacgaggtcaggagattgagaccatcctggctaatgcggtgaaaccccgtctctactaaaaatacaaaaaaaattagccaggcatggtggcgggtgcctgtagtcccagctactcgggaggctgaggcaggagaatggcgtgaacccgggaggcagatcttgcagtgagccgagatcgcgccactgcactgcagcctgggtgacagaacgagactccatctcaaaaaaaaaaaaaaaaaaaaaagaatagacaatatataaaagcacggactactggtaaacaacagtataaccaagacaaagtttactgataacatttaccaagtaagtaaataactgatacctttggtttaccatggtgtgagcttggggaaaatgttagtgccagaagtgggattagaaccaaagtctcttagctcctaggctatgtaccaactaatggataccagcctttcatctaagcagtgttaaggcctcactcgtgatttttcacctcactcctgctgatggggttagtgagctagggaaatcaattcaagaggtctgttgttttgttagcccatccaattgactcatgatgccaggcactaggtgtgtttaatacgttttcattggagttgtagcagcaggaaattacagacagaataagacaagttttaatctagatgttataataaagagatatggaaacactgataagagagcaactcttgctgactgaagctttatggaatgttgactagaggaggtggcatttgcactgggtcttggatgactgagtaggatttcaggaggcactcatgggggtaacaaaggccttgtagggagaagacctggaagtatgaaaaacgtgactattggaggttccacctcttggtgggggtggagggaagcaagtggtggaaagggagatgttggcctctgcatcagtgagtgctaagcaaaggggttgacaacctaagcatcatcatcccgtattggtgttgtgtacacttgacttcagtttcacatattaatattttaattcattagtgatatctaaagtacaacaaaatgtagattagcagattgcattgggatcaatgtgtccctttaggaatcaatagagggagagagaggaaatgacttttcttgaagaatgaattggtcatatacttgaagaaaggtaagaataaatacatttccaccgtggaaggaattctgacttgaggaacaacaagttttctatattattcttcctctactcattcttccctccctcctgcttccccaagtgttctactggggaggaaaagtaggcagaggaatgaatgtcaggctcaggaggagaagttctgagtgctaccaggcattctgtctcatctgcagaggctaagattgctggagagaaatctgaccaggacccaccttggagaggaaatgatgggtggaaaggccctgaggctctaagacagttcttgttgcctgcagggattcaaccgggcctggcatcatagtaccctgtagtcactttcatttaagcagattgacactttttgaaaagcgatgtttcattggaatgagattttgttggaaatagattcagtgatgactcttaatgagtgtcaccctgctgactgttcagggttgtgttctgcatgccatctgttaacatttctgagttctctgcaaaaccagcaagtgctgcaagatgttccctgacctgcgtaatctcagacatgttatggccagatgagtggggtgctgaccagggtgcctttgtggcacagcctttcctagaaggctcaagttgcacctgcagaattcctactgcactgtttaggcatctttgaggagatgtcaggacttggattagcacaacttccccagagcactgtgatgccaacagcttacagctgaaacagtaaaacagtatgtgacagcaattcagggaaaagaaatacacattgggggcagtggaataggtccttttggatatgaatttggagaatgaaactttggcaataagaatgggagaggggttggtaggccagggtatatgggtgtggggagctgtttcctgagctattagttggcctaaacactctcaattaaaatttcccttttctttaaaggaatacaatgtaaatgataaaatcaaatatcttcagactttcctcagaatttttattattgcttcttttaaatccatacaagcatgtacatatacacataaactctcagggttacagagaaagtgctactgaggtctgggcaggaaatgggattaatccatctgctcccaagcatgtcccagctgacccaatataagcactctgacaagtgctctccctgaaatttagccttttctaaacagaaaaggctgagtaatattacagtgaagccagtaacaatgtctatatcataatgctcataatctccacaatgattccaatggatattcttcaaaaggctgaataggaaacttccatgttcatgtttattgtctttcattcttttcttcttatactcttttcttcatttattcaataaatatctatttatctagggctgattatgtgctaggcactgaactaggtgttaagattatgtttttaaactgtaatgccctagtctttagtaatgagtcacagagaggccactcattacaatacaactggagagtaaatgccaagatggagaaaagcactggatggatgtgtgggagcacagagggcacctcatttattaagcgtctacttcatgccacctgggcatgaagacaaccattcattctcacatgggctggaatcttacaacaccctgatacagaatgtacagttatttgtgatagttgtttctcttgtcctgcacctggaccagtccccaagacatcttatccatgcccccatctctagatgtcctcaagaagaccacacagccaaattctgggactaaggtcttatcttctaatgaatatgttaattattactagcatgctgtaacctcattyggcaatatcctaagaaaatgctgccatgcattaaataaaattacttcatttctatagacgtatttaagtcgctcatacaagactctctgctggggcattagatgttacagcaatagctaggatgtgtctcctatccttctagagtgtgtcctccagtagaacaagtacacacatagaaccaaaatacatcaaaatgcctgaatgtcataatggagtgctttgtaagtatacaaaaaatgaagtggcttcttttggacctgaggactcaggaagagaaaatggtaattgttctgagtcatgaagatttgttagaatgtcaagacagaagaaccatcattgtaaggggaagaaaaaataaaactaaaaggactatgaatgggaaagtacaaggtatgctctgaaaacacttggtacacttggagtgttatcaggaaggttgtcaggaggggataaaataggaaagcagagggcagatcaaattggcctcgaatgccaggctaattcattcaaggcacattctctgatattattctaatcctaatgtagctccatgacagagtccaaatcatcctttaacttggttggtgaaagttttatcttgtatgggggcaaagaaccagattgggtgagaagtggcaatagcatggaaagaacacaatcactgctttaagaacttccagactggtgggcagccagtcttatccacagaatagaataaattcagcacttcaaaatttaatattcactagttaaaaaaaaaaattcttggccaggcgcggtggctcatgcctgtgatcccagcactttgggaggtagaggcaggcagatcacttgaggtcaggattttgagacgagcatggccaacatgttgaaaccccatctctactaaaaaaaatattagctaggtgtggtggtgcatgcctgtaataccagctactcgggaggctggcacaggagaatctcttgaacctgggaggcagaggttgcaatgagccaagatcgtgccacggcactccagccttggcaacagagcaagactccatctaaaaaaaaaawaaaaatctaacttctacctcttaacgtgatttatttttgtgctccttggacatgtgcggtcactttatcaacagacaaaatgtatgtatttcttggggaaaatggccccaaagaaattcttcctgtgatggagatgaagtgattaatactttattggactttatgcatggatatgacatgtacagtgacagttataaatcaaggaattctcaggggcccaaggtgtagcctgcttgcatttacagacaaaataaatttaatttgggaccaagaaaaaatgcatacaaatagtaacgtgcatagaaaagagatttatgctgtttaagagaattatatatggacacaggagacagggaggagggattgttgcttgcatttgaaagacggtctatttgtgaattgtgtcttttatctctggaggagaaaataaataacagcaagggagattcactgcaaatccacttttgtcagccccatggcaggtttcttcagtttgtagttgttacatttagatatgatgcagcccccatggatattaaatcattatgataattgggactatgatagaaaagtcattgtcttctctttgttgttcaggtaatttctcatatttacagtcattttgtgtacatgaatgaagttgcgtacagcattgggaagttattagattggggttccacttctgccaccaacattttctagctgtgtgactgggcatatttcacaactagtgtgagccttagttttcacatatgtacagtggaataagactatcttccacacagagcttttgaaagaattaaaagagagcatatataaaacctagaaggtgtgagctagtaatgtacaacttggtgggatatgaaactcaacaaaaagggtcgaataaggaaacccaaaatataacttattagtcttatcaaagggagatcagcctgaggaggaagtgacaaccacacttatatgacactatacacagaagggctaccctcaggtgtcattaattgtgaatcataccacaatgatattaagacaacacacttaaaaaacacacatctaggctaggcgcagtggctcacacccgtaatcccagcactgtgggaggccagggcaggcagatcatttgaagccaggagtttgagaccagcctggccaacatggtgaaaccccgtctctactaaaaataacaaaaattagccaggtgtggtggtgcacgcctgtaattccagctacttgggaggctttggtgggagaaacgcttgaacccaggaggcggaggttgcagtgagccaagattgcaccactgcactccagcctgggtgacagagcgagactccatctcaaaaacacaaaaacaaaccacacctctgcacttcaaatatacacgtgaggactattcatcttaatcatctctcaaagtgaataattagctttcaaaggttgttcctctcccccttttcaagagcaagcagagaaaaaacagaacaagtgcaggctattgccagatagataccctcctgcatgatctacagtcgctgctttgtggctccaagctggggtccagttgcgctgccaagattccacaccaaaaaaacacaaaataacatcacttacaaaaccttttagcatttgggggcaaacgatgatactacattttaatttatactgagaaaagagcataattttttctcttttctgctgtgaattcaattctctaacagggccaaatttgattagaccaacacaggctgaatttaagtgtgtagatttcaggtgatttgtttcttactttctgcaaaggtgccgatatcacataagatttcaccagggcttcttctagccagaagacatgtcctttgacagccaatgtgaccttcgtagctctgagccaggtagggagcaaatctttcacatgctgtaatcctctaagtgtgttttggaaacaggatttacatgtctccctattagatgctctttacttagaaccaaacagcattataaagtagacttccgagggcattctctttctggttagtaatttaactagaataaattgaatgctctggatgttttcttcctcctcctccaactcctcttctttcttcttcttcaacattgtcaacatcatcagacactgataatacagcaaatctgtgaaagagttatgctaaacactaagttgtcctaaattaactcagaaggtcttgccaaaccctgaatacaaaaaagggcaggaataagtttgttgcaaactaattttcaatttattgtgaagagaatgggcatttattatgagaagaatggacagtttcacyctgtcacccaagctagacccctactttgtacagyttctttacctgtgtcatcttatttatcttcacaatggtcttgtaattgtagttggcattatttccaactcagaaatgttaagtaatttgcccctggtcaccccagcaataggtatgtacttactctctgacattccatctgagatttttttttaacctaaactcagttttcttattcaattcmattgatatttattgagtacctattatgtactaggtacttacttgtactaagagctgagtatacacagtcaaataagacataatgtcttcctccatagagttttaggctggcaggggaaacaggtataataaacataaaagatatgtcataaatgcaaaaatgaatatatatatgaggtatagagtaagtaagatgaagaggggcatgattaatttcatttaaaagagcaaaatcataaaagacttactatcaaattttaaagaaggagaaggagtatgccatgcagataagaataaaggctgcatgttgcagacaggccatttccctgtttgaatagaagctgtcttcagccaatggcatctggagtagaaagtctttcagtcttgaaaggggatctgaggcactatgatatctgaggcaaagaaattttatacacttccttaaatgattattttatagtaagctagaatttgtgtatgaattttgctaatagcctagatgtggaatttttaaagcaagaggaatatgttcacattcaggtggcgtgtttaaagaaaaagaaatttttttcatatctgggaacattggattagtttcctattgctactataataaattactacaaatttagtggcttattacagcacagttctattctcttacagttttggaggccagaagtctgaaatcagtttcactaggctaaagtcaaggtgtgagcaaggctagtcccccgtgaagactctataagaaatccatttctttgtgttttctagcttctctaggccacctatgcttcttggcttgtgacccccttcctcacagccctccaacctcttgttttcattatcttaccttctatttcctcctttgaccttgcctacctcttacatggacctgtgtgattatatttaggacacattcatataatccaggaaaatctccccatctcaaaacccttaatcacaccttcaaagtccctttcagcatagcaagtaacattcacaagttctcgggattaggatatagatatacttgggggccatcattcagcctactgcacacgggcattacagtcaaaacttcttgcattggcactacttatgggtgcatttttctggtgattgttagaatgtctgtgctaatttacacttgtccaggtctgcctccttttataacatcaggataactaggggcaaataatgtattctctagcaaacccctaatatgtttgaataaagttaaaaaactttctctttctattctgactaaaggaagccaaagcaagagcacattgagaaaccttcatacctatgctaatggagacttgaaaattaaggaatatctatagaaatcatggaggaaaaacagacattcttgaaatgccacctgaaacagagaggggaaagaaattcccttatgcctcccttcctcctaccctccaatctcctgttagtgcctcccattggctgaacctagtcagaagtgattttcccagggagcaaattccaaattacatgcaaattgcatgtaatttgcatgaagtcagcactttcgatgtaaaacagagcaggggaagtaagggaattagatatgagagaaaatgatcagcacataaactgaatcttgagaaaaccagggttgaagttcttactgagtttgtcctggttattcctgcctcatccccttcaattttgcctaaatatctagacattctgtgcatagaaagaatttcctcacttcactggttctttacaagctgagtcattagtgatggcactattcattgtgtgtgatttcaagatcactttcctgaccagggcttggaatttcttagcctttctccctttgagcaccaggagggaacaggagctgggagaagctgggggctagtggggcatattgtatttaccagtcactgggcttgatcatagaactggaaaatagaatgcccagcaggaaaaattcctcacttcacagtggattttgatcaaatattaactatcctgagtatattttaaaatttgtacagtggttcctatacttagaggccagtgctttaaactccccactcagccctacttctattgagcagtccatctcccccaaccccgtgttgtgcctggtctctaatccaagcttttaccagacccacgagaccatcctaattggattttaatttcataataatctttagcaacacattgagttcaattcattatagccctgagtagaaatgcaaatgaaatagagctccccatctttggccttgagaagctgccactgctgctgctttttaacttttaaaaggtataaaggaagtttcaaagaaatgtacagagagctcctgtgcaccttccaccctgccttttcccaatgttgacataatgcatagctatggtgcaatgttgaaaccaggaaatgtctacatccatagagaagcagcttcattttgtaagtttaagaagactcctcagggctggggatggtggtggtaggcaatattgtagtagtaatattaatcccatatattcacacaatgcttttgtactttttaaagctcttttatcccttcccatgaatgtaggggttctattagcaagttccacattcagccaagggttgctgacacctcagttttacttggtaattcaaaagccagaggttttattataaggggctgcttcccattttctcatggaaggacactaacatcaagttatcccatcaaaagatgacttagtaccctttgtcctgcactttctattgattgaaagaaatttctcctcttcagaggcagaagaggcatagtccttgcctctatgtagctgctcccttttctctgatatgccttcctttacccctacacctagtcttctagtctacccaatgcttcctcatcctctaagattaggtctaggtgttaactcttcttaagcaccatcctctttgtacttcctctctgtactgtgtgtaccaacacagttctttgttcatgccttaacaaacttactgtctattttcttgcctgtgtcccctaatcaacagggagtcctttgatggcaggaattatatgtttaaaccttaatttctatccccagcacttgctgtaaatggattaatagacagattcatggaataattctgtgtcaatctggaaaggtaggaaagctttaataaaaactgaataaaaggtataaaaataaataaattctagcttatcttctcttgaggtcttctgtacttctttgcagatgtcacaaggtttggggatatagaacatgtgatgatgacagagctgggtccatatgaacttttcaaatagactgatggcaagaaggcagccagattaaatagaattaaatataaattttgagttccttgttaaatgtgataaacacctgcctatatttttgttcccttccaaaactccactaaagtaacaattaaggaatttaaataggtaaataatctaaggtccaaaaagaagtcggtcaagacaacacatgtaagatatatgaacaaaactttggaagctggaatgctgatgattgattagaaaatgacacatcagagctgagaaagcagaaacccaagtacttacgggaatatraagctaatgagatgtgcagaatcctggaaggacttgggtattaaaggccttgggtatctgaagacatgggtgtgaggaaggcctgaaaaaacaaagatgagttagaagttttaaaaggagcagctatagcttcaaattctctcttcgacctgccaatcattcccacccaaccaatgtttcctctttggaaagactgaacaagattgaacctgaggcatcagacatggaygatggtgggggtaaaatgctgcacagagaacacatatataaaagaaggtatttagtgaattgtgagacatacccccgcccccacccttgtctaagccccactcctcccttcactcccagaacctggtaaccaggcttttaacctgaaagaaatgatattaagagactctggggaaactgacttggcatagagatttataggtcctgatatttgagtgtctccaaaatgaacatgtcccctgtttaccactattcaacaatacctgcctgcacagagagcttccaatcagcattttagtgcctcatcattaatttggacttataagcaaggatcaccagacacctgagracatccttaaaacaaaacggaatcacaaagaatccagagaatcaagaggtaatccacagaatggagggaaacatcaaaatacctcttattaatatacttaagaagatgagacacccattaattgagaacagtagcttttaaaaaggaacgtttagggaagaaagagcttttggacatttaaatgtattagatcacacctggaatatcatgttcagttctaggaggaccctcccccacccccatcttaagaggggcattgagaaagtagaggttgccccgaggaagtcagaacctggatgtattcattcatgcacatacatgtgcatatggcaaacatttgtcatttgccttcataagccatcagacacagttctaggagcgaaggaaccagaaaagatccagaggaggctgagtgctcaggagttgggaaaggatggagacagatgatacaaaataaagtacagtggtgagcagtgtgtgagaggagagaccascaaaagtgtctacaaaaagccctaaggggagcagctgaaggatgtgaaggggaggtgtgttaccaaaagaacagaagaaattagagcttttccttccttctttccctttctctttccctccctcccttccttccttcctctctctctctctcwctctgtttcatatctgaaagcctattaaatagagggagagaatttgttctatataggagataaaaaaggattcagatagtgactcaaaatgggaaacaaactaagctgtttgggcaaggaacactaaattcctactcaagactggcttttgtctgaaaggtgttcttttcacatcctcttgcgtccagataaatccaaaatgtgccaaatagaaacctgctgtttctgctatagttctccactgaaccgagctagcttgataagctcttgtgtatctgttagtttattctaaaatcaatcaaacmtaagtagattgtatcaaagaggataatttcttaaattgagttatagaaaccagctctgttttggttaaaataaataggaaaattgttgaaatgcgatgattcctggctcttggatttaaagcatgaataccattctcgagcaagtcccacaaaattcaggcacagactaaaggagatggagaataaattttccagcaaataacaatggaaaaaacttaccctgtaactgtgctgtaacaacccccagaatcgggcttcagtcatcctgcatctcccaaatttttagcctttcgttgtacaaactgcaaataattgacaccaggctctgagtcagctttctgatcctcaccctcatggttcaaattggagtctaattataggagctactcctacacctccataggcagcttgcttgggattttttcttaaattattaatcagaggaaagataaatttgcctgttttacttatacagggatgaactgtctcctagctgatttttatttatttatgcataaaagtctattttttatggttacttacttttattatttccttccctgagtctggaggatagaatggtcagattagtgtatgtttcatacaaccctatctgtcattgcagcacagccctcatctataaatattccttaggctctggtgtataaattgcttcaattgttaaagtgtataaattgcttcaactgttaaagatgtatcttcccatattcccagtcactggaattcagagagcttaggtcataatgatatccctttaaacccaatgtgtcccaacatggactcagtgtcattttcttttcttcctctcaatggcagctcctttctgttctcagtcagttgcccaagctgtaaacctgagggaaccttggacacttccactctttctcatgggccacactgaattaatcagcaaagactcttatttacacttaccaaatgtatgtcccttctccattcccatcttcttcaccatttctcacccaaccagtgaaagagatgcctaaatgacctccaggttttctatccactatccaggttttccatcataatactggggactaagtgacaaatataatatatcccttaaaaaaacactcaatggctttgtaatatctttgttttagaggtcaaatttataacaaatggtactatgcaatgaatggcatagggttacattttggcctcacttaagtgacaattccaaatccatgtacaaccagggagttcttcactttctcatagatcctttgccaaaaattaggggaacaattttttagaaaaaaattactgaaataagcaaaagaaatttcttttctgagtcatggaagtaactaaactgagcatgaaattgttaccataaattgcactgaggaatttctattcagctcctgtttatgagtttgggggctgtgggtaagttcccattatgtgatttttctggctgcataacacaaaatactcgcaatattaatatgataaataggaacacatttagcatctcaaggagtaaaaggtaatcttcagattgagggagaatctagctaggtgatttttaggattcagaaatagataattatgttgagaacgaagttatgagtataaacaattctctcaatccgtctctttgccgattcttcctttcacctcaattgaaaattgaaaattattttagtgggagggctatagaggagtagaacatatttatcgaattctccacattttgaaatggctggttcactttcttatcaggaagagggagagatggccacattagcagcctcactccatcagttagacatatgtcaggtacctgcaatgttcttcacagatactaagcaagtacttacagataaataaatagttgtatgtatgctgagtgctgcaaaagaaaagtatctgttgtatttgaaggaaagacctgtcgtatctcaaaatgatattttgagaagctttcatttgagcagtatattggggaactcaaacaaagccttttcattttgatcatgccaaatcacctatagaattcacttatagagatgtatctatagtcatatcagaaattggctgctaaatggttacttagggtaaccaaacaagtctgagacagccatggacatgttcatgtcaggaacaaaacagaaaagtagtcacttgtagaacaaagtctagaatcaatgtaggaaaaaaaaaaaactgaatgaaactaggactagaagatttgagtttgagtcccagctttgctgcgtggccttggataaattgactagcctctgtgagcctccatattcccttagtggtcttcccattgtggctctacttacctaggaatagtggtgtattagtttgttttcatgctgctgctgaagaagcaagtcacattttgcatggatggcgtcaggcaaagaggaaacttagatattattttagctcctggctccatgatttttatataaaagaacaagacaaattcagcgaagatttaatatttgagtttgccaaggaaggttttcttacctagtggatgcagtcttaggtaytatgccttaaattagaaggcacagttcctagttcctccttctgatgcaccattagctataaatcacaccaattaaactacaatttgtgcatccacactctggcactttcactcaacctgccaataaaatcttgagagaatcaccattggcagctaggccmtaataatatctgaagtttccattttcccccacagagtttcacatttactctctcatgcatgatgccctttgtggctttatttttacagmtaagacaggaatctaattccacttttgagataaatctcagagagaggaagtagtygtgtaggcasgttgggatatttttaaaaaactgcattggtatgaattacttttgtcaccgctttctatttatactgtacaattcagtttaccaaacatttttatctgtttcttcatttgatcttcacagcagtcttgtaatgtaagcaggaaatcagtgatgtctccattttatagacagggaatataaagcttcaggagagcttcacggtttttttttattcatttattgaacacctagtctattcctaacaatggactatgccatttacaactgctgttgcatttacctttcaaaaaatctgatcaggtaactactttttttctattctgcatatgagaaagctgagtattctctaaattgagtatcttatgcaaaatccacactaaaaatcaataataaacttatgattcaaacatgaatcagatttatctcagagccttaaaaaataataatacatcagttactcctgtcagccaaagaaaacaagctttgccaacttcaggaagtttctgtgttgactccattttgcaataagtctgataatcagagaaaatctgcctttatgaatctataaaacaaagcatgcatgaagccaaattgaaatttgatgtatgtaattttcagagttatatgcatattatatgaaatagctagttagggattcagattgttatttgcctataaaacttactttatttcacacattaaagaattcatgagtgtttggctgaaacctctgtaaagtttctccatccaagctgcaagagattgttctagtcaaaacaaatgatcccaattctatctgaaaacagagaaggggtgaggaggaatggagaaagacataccttaattcagtgtgttattaaaaattattctaaaaggctgatctatttagtattagatctggtaagctaaaggatcatttctgtttatcagaactcttcatttaactcatccaattcagcaagcacttacgttagcatttattagctgataactgtgtgccacacgctatgccaggtgttaggatacagaagaaaacatgataacatccttgccctcatggtatccataactgagttattaatggtcagtagcaaagaagtacaagagataggtgcatacatcctcttcctttgtggagtgcagaaaagatagactctttatattgtctagaatttctggttaagttggattctgatgaatttagttcataatctatttgtctctctccatctctgtatctctctctctttttctatgtctctctctctctctcacacacacacaaacacacatacacacacacacacacacacacacacactccctctctcttggatttgtaagccaaacatctgtaagtctttagcaatggaaaattccacgtcaccacttcaacacagaggcaggttggcaacttgagagatgagctaagtcgggttgaagtaaaagctagtaaaatccttaggcagtagcctggagagatccaccccaaatccttccagtcaccagagctcagcgctcttgacggaggtgagcattccagtgcgtatctgggaggggagccacgctcctcaaatagttcctaatgacgtccttcctgacaggatgacttgaaaagcagccagggtgagaaaagctctaagtgtacctctaaagcctaaagtaatgtgactgggccccttctgtgcatatctggctctgaaatcccaggaaaactagaaaaagaagaggtgatgaaatggcaaccgtctaatattttctgagctccaaataattaaaattatttttgtatcatcatatgaaagaatgttgacaaagcattgcttcttgaaattgaggtgtaaatagtgttctatggctaatcctcttatgtgtgactatttggttaagagtccggtggaaagagagcagtagtatatttgtttgggattttctagttttaaacattctgaattatcatatttcattgattataagacttacatcttcccctctctacaaaatacatttcagcttgtgaaatcagaagagtcttgtgtccaccctctccaagaaaaagatgcttttattcattgatggtgctttttaaaatcgatactgcttaaaaggatggaaataaattacactctcttggatattcagaacaacaatgtatgggggtagggatgatttctatattttacaaatgagaaaacagcatctctgagtgggtatggtattttcttaacatctctcagagccaggactcaaatccagaaactctgattccaaggtactgctttgaaccccaagttgctcttctcactctataagtaaccagatagttcacaaagatttaacctgccccaatttgtccattttaacatggaactgactgtattagcgtctttccatgatagaagggtttcttgatatcctgttaccatctaaaaagaacatgatactcctcaaatggagcagatatttaaataccaaatgctctttttgtattcacaagatgaaactagaaaattacaagtaactatgcactatcctgtgagcctcttgaggaaaaaaatctgttcagtggattcggtatccccagcaattaggattgtgcaaggcatgtaataaaccctgaagaaatatttactgaataaatgaaagaaggatgtttccgccaaagaaatggaaacatttataattgctcacagcatctcatccctggagcagtgattacatgctctgctaagaatagatgtaaaccatttctgcttcatccttaccatgtacccttcctaagcctcagtgacaatgagggtcacatccaggtaaacaatattgtgacccccaacagactacacaccattgacatttaccccagccatattggaagttgtcctaaagcacaaatttcctttattataagacaccaagagcttctagttcagatgtgtctatttaaagcatcgcgtgtgtacagcaggtggtctcttcaaactaattctcctgtagtgtggaaatggataactcagcaggaaagcagtctctgttgcttggatgtgcagagtcctgtttacagctcagtgatcttaccagttgttgttaaagctgcacacgtttataatgaacaaatagaaagagggtgccactgtcaccattagtaccactaagaactgcatatgtctttgtcctgacaggagtcaccaaagtaataacagcaacacctatcttatattttcagaacacttcagtcaaatctcattttgagtctcacaaccactttgtgatgtgaacctcacaatttgtagatgaacaaactgaggttcagtaacttcccaaggccccactagtaataaatgacaagattaagactaaaagctggccttctaacatagagttcctttttttttttaattttactcccagtaccttttttttttaattattatactttaagttttagggtacatgtgcataacatgcaggtttgttacatatgtatacatgtgccatgttggtgtgctgcacccattaactcgtcatttaacattaggtatatctcctaatgccatccctcccccatccccccaccccacaacaggccccggtatgtgatgttccccttcctctgtccatgtgttctcattgttcaattcccacctatgagtgagaacatgcggtgtttggttttttgtccttgcgatagtttgctgagaatgatggtttccagcttcatccatgtccctgcaaagaacatgaactcatcgttttttattattcacaatagcaaagacttggaaccaacccaaatgtccaacaatgataggctggattaagaaaatgtggcacatatacaccatggaatactatgcagccagccataacatagagtttctaaccctgttccctccgtttatggcttcctcttatctggcaatcatgagacccctggatgaggtcgtgactgatcgaggggcatgctgcccaccatctcacttgggaaagggggagggcaggccatggcctcatgctattgcctaacccactgagtgtattgttttcttatctcagaaccaaagtaagccacctgagtctcgaagacatgagcagctgggcagttttaatcaatgcagattaatcctactgcattaaacaatgccagccttctcacaggaggcaatgcctccttttctgtgtgaatggtagatttgcattctgagtcrccttacttacccttaacaaattgcaaacaagtgtatggcagagcccccctcactgtgtagtttgtggtgttcacacctatgaccttgctccatccaagtgtccatcagtagctcaaggccttgagataatactgatgaatgaaatcactgatattcctgaaaatagcagcagctttggaattggacattattctcctggactccaagtcactatgaacttatgagagtaccctgagtggttgcctagcagatgagaagttccacctgatggcaagtgtcccaaagtatggccatctgtggctcattcctatttgacctggtgaagacatcaattcataacaagtagagggaggccgtaacagggggctctaggagcagacacaggtttccattttactcagtacagaaaggggttacaattttcgcaagtgatgaacaagaataggtgatgaattacacacagaagtaatagaaagaattgacagtcattaccaagcgccaatcttttagatccatcagctctctcataatcttctcaacagatcttgaggtaggtccaattcttattcctattttacttgagaaaattaagcacagaaaggttaataactttcacagtaatgtatagctatttagtggcacaaccaggattttgactccatctacataacccaaatcttgtacactttttactattatcatccatcttgttcaagtgaatacaaatgccagaaccccaaattaaatgcacctagtcaggaacaactggctttacatactcaaaaatgtggaggagaaaatgggttatcatatatagaggtggagaaagaactagctgggggtaatgtttcatgaagctcctctaaaacgtttgcttaggagttgggtttcagtggtttgcttcttgttacagaagaaaatccccccaaaacataaaacaacttgtaatttaaaaagcatttaccaaacatctatttcatgcaaagcaagacagaagaaaatgctgcaattttaatattgttttatacctcggcatgatcatgcttaattttcctgtcaatgtcctgttctggaarcaaattctttcaggttctgacttgttcaaaactatgaaagtcctgtctatacagaaggtagaatgatagaccctgaggtttgggaatagagatgagtgaggcatcccaagtctccaagtagcttacagtttgatagagggaagaccagcatgcacctgactaacacaatagatgaagggaagaagagcaagatgtcaagaggggaagggtggagaattgaggaagccttgcattctaaacaagccttatattctaaacaattgtggtgttataaccaatgtcatgatgtcatggaaacaaaatggcttcacggcgatccagggttgaatcctagctccatgttcaatgagctctgttacctagtagctctatgacttttgtgaagtcagttaacctctctgaacctctgtttcctcatctgtaaaataatatatctacctcagaactttcttaggaaaaataatgtatttttaaaagtatgtagtacagatcctagctcattgcaggtgctcagtaaatgtgaattccacattggatgatataaaaattgaagcatttgaaaatttcattcaaatgttctcctgaggcttggaatcaagacagtgttatgaatttgactgaaaaatgttccaaagggacaggcatagatatgagtaaaacatttgaggaagagagaattaatatttaatggatatggtagtgttaggtttttctgttttaacttgttgaaaaatacaatttcaggacttctataaaacatacttatatttcacaatttgtgtagcaggtttcctgtttacttctagagcatttctaactatgaacttgtttatctccaagaagttggagacagagctctgccgccacagatgcaccatttatatttataaacccagatcttactagttttactatgtgaaatttcttgtgtttatgtttagttttcaaagaaaagtagcaaagagacagataagcacctctgacacaggatttacattgagatgactgtcaaagtaggaaagatgaaaacaggatagattccaattaaggcaaatgcagtataaatcattcattttggggaattttaacaccatagaatgtcatgcagtcaaaacatttcgaaagcatggcagaaaacattttgggtatctaataagccatactgtaaggcaaatataatttattattaaggcaagtattctattgtgttacaaaaaatgaggcagctacaagagcctaacaaagtgttgattgtatatagatgaagtgtcagagaattgtttccaatgtatgacatgattgagatggagagatcctggagaacaataaaaataacagaagaatttggaagtggtagttatttgacggaaataaagccttggaattagaatatttagttttgaaaaaagtagcactaggggagatgcatgttcatctttcttattgcaaaaacataaaaatgaaaatggacaatttcagtacctggagccattttataactgaattcatctaggtattctactccctcatttattttttattcactcaaaaaaaagtttattgagcatctcagacactatgttaggaaaaggaagttccaagaagaatgaaaaatatttcctgccctcagagggctcagtctaatggaagatgaacaactgtacaaataactgcaagttggtgtgatgaatgcaatgaagtagcaaagtgattaaatgagggttgggacttgcacagagttagatgtttaagaaggggcagctggaaggtgggatctcctgcttttatcatgggtagtaaagtcatcaaaggtataaaggagagtgtcccatctctccagatgggagatttagtggtacttagagatgacatgtagtatttatcaagtggcaatgtaaagcatggatcagaaaaagttaagagttcttgatctgtgttccagacaaggcccttttcttctctgggaaatgctattagaggctgtatgatttttgtgcaaaggtttgaccagtagtcccacttctggtgctctgctaacctgctgccaacattcacatatacaccaagatccctgtttgtgatagcaaaaagctggacaagcctaaatatctaatgataagggagttgttaaatacagtctaaactatggaatagactattaagagtattaagaaacatgatatttatgtatttggtagaaggcaggaaaatatccaaattacactattaaaaaggggggaaaagtcttaatacaataaatagctatggtcttgtttgtatggttatgtgtgtatgtacacacagctacccacaaacacacacatacatatccggcacacaaccatacatgtaccactagggtaagctgtagggaaagagagcagtgagagagaaggtaagggaaggcagaagagacgagagcctctcaatttttatcctgtgtttttctatatctttcaaaattttcaacatccatagacttcattttgtaatttaaaacagaaatgagataatgcccatgaagcattgagcatattgtctgccatgtggccagcaataaatgttaattgactcttccaaggtggcaagaaaatacgacttgctcaaaatgatttaaatctgcatacagtatcgtatctttatttttccttaattttaaataaagacagggtctcactttgtcacccaagctggtgtgcagtggtgagatcataagtcactaaaaccttgaaatcctgggctcaagtgattttcctgcctcggtctcccaaatagctgggactatatgtgtgtgtcaccacacctggcctgcatacagtatcatattgatgtttataaataaatgttttctcttgctagaaaatgaaatacattttcctaaattatagtcaatagatttttaccttaaatatgttgttaaatatgtgttctacttatttaatcatttaggacttatttattcaaagctaagcatgagcaggaagccttccaaatctggataataccagactttgcttatgcaccagaaatttccagccaactattatggctttatctgttgtgtactaaactttaaaaatatttaatattcagagtttattttcctgttatctatttattgctgaaaactaaggtcaaatcttttagaaaagctatccctacattaatcaatacatatccagtaagttgaaatgaaattacattttatagaactttttcttataaagaatttgaaacactctgtaagtagatcatcttttattgkatacattcatccttgttttattaaagttgtgaataaattgaattgaaaatcaaattgttttctgaaatatactgatatactctattaaaattcttcatggtgagtttctttgtaattaaaagaaccatttataattccaattaacatttttaagtttatttgtgggtaagttaagcctgctgaattttctaaagcaagacattgttttgccaaggaaatgatagaagtttctaggttgtgataaaaaatattgaaacatcaaaagccgtttctttttacatgttcattgtgttaataagtaccttagaaccgattctttctttatctttattgggttgacatgccaaaaatatttttttctgtgaaacaatagcaatgttataatatacagatttctttgatttttttatccccataacttttaatgtttgaaaatttctaaaatttggcatgtgggcaaagctataggacaaaattgaggtatgatcccaagtggtcaacttctagcagacccccaccccctaacaaaatttagttaaattaaatgaaatttcttacacaattcatcaccaaactcttgattgtcaggtctatcaggctgagagtaactagagtctctcctcaataccctattgagttgggattcccatggagtttttttttgttttttgttttttgttttttgctttttgctttttgtttttgaggtaattatagattcacatgcagctgtaagaaataactattttactcagtttctcccaatagtaacattttgcaaaactattgcatattatcacaactaggatattcacattgacacaattcatcgatattattcagattttccgcagttgtgtgtgtgtgtgtgtgtgtgtgtgtgtgtgtgtgtgtttagttctgtgtaattttatcacacgtgcagttaccaatatccaccgtgcaggcaagatagagaacatttccatcaccacaaggatactttacattgcctgtttataaccacatctacctccctgccttcccatgatcccccatcctccctctcccagcccccatggactttttacaagttgggaatttgatggtggtgtgttttccaggtacgttttgggaaataactgatttatcattttcctcttataaatgtctgtgaataaataataggaaacaggcatacccttgagttgcacatctccccattgtttggcaaaggaaccaacaacgtgggtgaggggctgcctgggctgtgcagcatttccaactcttgagggcacagagcaaaatttgctacctttgttttcattcccagattacgctcgatttgaggccaaaatccatgacctacgagagcagatgatgaaccacagcatgagctccgggtccggatccctgcgaaccaatcagaaacgctccctctacgtcaggtaggcaaaggagtatttctctatctgcactttgtgagcaattcaacttgagaaaacaaaggcaacaccatgtagcaacagaacatgtgtcccacttaacccactttcatcagtacactactgaaagaccttgtgtttaagcatttggaataaatgtttgaaatgttattagattaaattagttaaaggtgcctgcttttatcaagttattctttggcaaagttatgattcaggataaaatgctcagcataggttgcaataaaaataatgagaagaaacattttcatttctaataaatcttaaatggcatatgtggaccaaacccttggacatttacttaccatcagtgtgaaaagaaaatattcctgtattatctcctaacctgcctgatactgattgcattaactttagtgcatcagtttaaaatccacggcattcttctaaagagttatgtgcttttctctaacaagttttggcagaaagacttccttctgtgtcatctcgctaccagtttttttctcagaccatagaagttacttgttccttgtctgacaaaactcatcaatttaccagaaaaagataaatgattgattgaatgtgaaatgccttccagtctttcatcctagtagctacctcttgagtaagatccatcaacactcaactataacatgctcctcttccaagacaagcttcctgtattacttccaaacttcatcagtgctgactgtacttttaaaaatatataagtactaacaggcaaaaggaagaaagtgatgcctaattaacgggcaacatgaatctatgtaccatatggaagaaccatgcccattcttattgtattctccactccccactctggcctgaattcaatctgactccagcctgaggtcatatccttcttacctgaaattttaggcatgacgtatatgttatagatactaatttacatgcttgagttgaacttttgctgttggttccactttggctctaaagttaagttttgtatgtatttggtattcacagcagggctaagaagggagtgggattctggaaggcacaggttctcatagggcttaatttcccgactgaactgataagcctagagtcccttcttattccagggaagccctgagattaagaaaaacaagttattaaccctatgaatttggccaactccatttcaaaagattattttgatacccttaattgtaatctgtgactgttcagaaccaccctaaaacatgtcttgtagtgacattacaaatatgatggaaagttaacaagctccatttgtggttcttcttctctcttgtgttgtattgctggtctacatgctacaaagtatttttaaattttgaaatgttttagtccctggtagcaaattggaaaaagtcagctgggttaataggatagaactaaatcagttagtgtaactgaaatggttatatatataataaagctcggagggaaaattaccaagtgtcttattaagagatagaatgcataaattgttcagatactagaagaaatttgctgaaatatattgctaatagctattaagttttggaagattaagaaaattaaatgaagtgatatgatattatataaaactaatacacttatttgaaagagtagtaattagattcagatctttattctctaaaatcataaataaaagtataacgtacagaagagacaaagacttagagtaacaaagtaatggttggagattgtattgaaaggaggaacctctttttaatgagactcaaaaatacttgacatttcataagaaagtccccaaatgaaatctctgtaatatacaaatatggtatttagtttccaaatgttcaattattactacttattttgtacctagagggctgactttagcatctaaatgactctaagagacatgaaattaaaagaaatatgggccatgcgtatagtcatatcagcaaatcagaaagaaagaacttacaagagccccctggccttattctcatgaaaagtgataaaacagaccaaaaaaaaaaaaaaaaaaaagcaagaagcaaggcctaagtgaaattcttaccaaaaaggattcaacaagtttgtacctttgtacttcttgaatactaattttggctacaggattttcatacagatgcttgctttgtctagagtgcttgtataggaccacggtcagttgtgtttattttagaaagtcaactacttgctctctcagaataaattactagcagggtttctctgattatataaatataagaggatgatcatgtctcaaatctgagaataacatcctgaaaatggtgttattctcctcactttacttagctttatgtaattctagggctagaaggaaccttagctatcattgggccctctgcttaatttacagaagaggaaactgagacctgaggagaacagagacagagacttgcctgtgatcccacagctatctgtggcagaatcagctctcctacccccagtcccatacttctccccacatcactctgcctccctaagggcctagtttatgtggtgtcagctgttgaatacactttagctgtgattcccaatctgcttctgtcagcacagtgctggactctttgattaaggaataaggagaggagaaattctaacacaaatgtctttgaggtttttgcacaggataaactgtgctgtaggaatgtgggatttctttggtattatttatagttttctgtgaagccaaaacctaaatcagaaagcaagcaccttctttgttctgtgagaaacaatttagctgacttagtaaaatatttgcttgcaccaaaaaaccattcttccccttggatttacctcccataccctacacacacacacacgcatgctcacaagcatgctcccaactctagccctggtcctggtggtgtcagagagaatgtaccttccyggggtcttgcagaagctgccttcatttccccactagaaatgatcttcccaggtagtagcaatttgtttacctgaaattttgaagggagtggtaaccagcactctctgagccaggcagtattttaaatatgagccaaccctctctattttctaatctagttatactttttttcctttaatctttcgtgtgaagtgcttgaagtactttagtggtgctgtgcaagtggaactgattattgctaatgttaactgttcttgttctgtgggaatgatttgggtatgtttgatttaatatgctactkgtattgtgtatttcctgcattgtgaaacatatagcagtaaagcattgtgaaacatgtagttcatttaaaagtaaataaagttacaaatatgaataaaatgtttttcaaaatgctgcacaagtacattatcaattcttcaaacatagatgcatttaggctcctgagctactggaatatgaattttattgcgtgtattttgaggctctcgttcactgccttggaagagtgagtttatgagctcatgaagatctccctactctaaaatatccttttcccttcttatctactagctgataaaagctggtataataaagaaagaacaaggcttttcctgctactaacagggatgcaccttttgtataaatgctactaggagaagccaaagatatgggggttaaatttatacaaaagtgcagatttctaaagaacaatcctttgttttgataaaaggaaagctagagtacccaggatgctgggagaatggggagggcaaggaaaaaaagcaaatcattccaccaaggggaaggagaaaaaggtcacaggaaagaatgtaaaagaaaaactcagccctgttcacttgttaataaaacgtatcgattttcagagttcaagcaaayaacctctgagttttgaatgtggatttaagaaacagttgctgtgatttattcagaccttcatcaaacattttttgagtgtatattatgtgccaggacctataatggacactgaggacgcagcagtaacagtcatgtttcctgtctgcaaaaaacttatgtctgctggggaagacagacgaagggaagataattaaatgcaatgtgaaatgaaaagatctgttagctctagaaaggcctggaatcttgattgcttccatggaaagatatctaagtaatttttgaagctctgatatgaggtaaccaagagcctttcaaatatttagaagcaaagtaagaagtacattatttatcctgacccagtaaatacatatacacataaaacagaaagaacatttttgttaaatagtaataacactttttgtatacagtgtactttgttattttccattctgtttctctcctttttaaaaaatggagatcatagctcattaacttgatttaataactcactaatgggtcatgatttacggcttacagatggaatagacaagagggaacatgccaggcagataacacggtacacagacaaacaaaagagagtgtctttactaccttatattaaacatatcgaggatccttagacccttggtgttgtagccagcttggaaggcagttatccctgatgcagatgaggaggtagaaatagagggaagtatttgtcagacattttctatgggtcaaccattattctattgttttacatgtattatcccatagaattctccccaaaacactatgattcaggggatattgcctccattttatagatgaagaaactgaaactcggagaagttaaatgattcccccacgatcccacagctagacaacatgagcatggacattcagatcctatttgtgagacattgtagagcagcatttaagcacacagttgctagcttctgccaggtagaaaaacatgtgaatcatggttctgccacatcctagctctgtgaccatggacgaatcagtttctctgggcttactttctttatctgtgaagatgagtatagtaataggataccataaagtggttgtggcaatggcaacaaaagccacaattgacaaatgggatctaattaaactaaagagcttctgcacagcaaaagaaactaccatcagagtgaacaggcaacctacagaatgagagaaaatttttgcaacctactcatctgacaaagggctaatatccagaatctacaatgaactcaaacaaatttacaagaaaaacacaaacaaccccatcaaaaagtgggcgaaggatatgaacagacacttctcaaaagaagacatttatgcagccaacagacacatgaaaaaatactcatcatcactggccatcagagaaatgcaaatcaaaaccacaataagataccatctcataccagttagaatggcgatcattaaaaactcaggaaacaacaggtgctggagaggatgtggagaaatatgaacacttttacactgttggtgggagtgtaaactagttcaaccattgtggaagtcagtgtggcgattcctcagggatctagaactagaaataccatttgacctagccatcccattactgggtatatacccaaaggattataaatcatgctgctataaagacacatgcacacgcatgtttattgcggcactattcacaatagcaaagacttggaaccaayccaaatgtccaccaacaatagactggattaagaaaaggtggcacatatacaccatggaatactatgcagccataaraaatgatgagttcatgtcctttgtagggacatggatgaagctggaaaccatcgttctgagcaaactgtcgcaaggacagaaaaccaaacaccgcatcttctcactcataggtgggaattgaacaatgagaacacatggacacaggaaggggaacatcacacaccagagactgttgtggggtggggtgggggaagaggggagggatagcattaggagatatacctaatgctaaatgacgagttaactgggtgcagcacaccaacatggcacatgtatacatatgtaacaaacctgcatgttgtgcacatgtaccctaaaagttaaagtataataataataaaataaaataaataaataaaaaataaataaaataaaataagtggttgtgagaattaaataaaatagtgaatttagatatctggcacatgggaagtcgttgataaatgttggtaatattcatcatttactatgaagccaccttttccctgtcagacagagagaccacagaattggttgtgactaagacgctgttttctcagcagtgagataagcctctctcatcccattgcttgccttcagcaaaggaagaaggatagactttctgatgacttttagatttttgctcctctggaccccatgaagcctgaaggagatggccagcattccatggctccagaatgctcagctctgtcaactcatcagcatttctcatccaaacaaggctctacccagaggcagaacctgaaaggaattcagtagaagccacatgatagaaagactcactgcatatacagtaggccattccaagtctccatatatgttatcagtcttcctaaccacatgatttcttctatttcccctcggcattcttcacccctttccagccctctgctcatagtttcgttctgaatttcaaagtcttatttcttttacagtagttctaagtctatatgttactcaaagttgctactacctgagacagtttttgcctcaaaggctatgtaatatgacaaacgcactcaggtcagcttcttgcccctcgtttaacttaaggcattcataaattgattccttcatgccttgattctttcattcaataaatatggtgtttgtacttacctgcaatgtaccagtctgtagtagatgttaagggcacagtgatgaataagaccacagaacccctttcctcaagtttctcacagtctagatctataggcaatccaaatagtatgcagaccatagaaatggtaattcatttcctgataccccatgtgttatgtgccttgcaattattatcctattttgatttttacaacatgcctattgactccctgaagtgaaatttgcccagaagaccactaatatttgaaactcacctgttaagatagtgactgctctggtccttgttaagcatttatgataaaatgttttgaaatgaatcagtattattcaatactggacctgcaaatcccagtaatgtcttgatgtttcatagctctagtgcattatgccacagtgcttggcataaagaattctccttaggaaacgtttgttaaatgaattaattccaagactatctttcctacacaaatgtgagagaaaatattaaaatataagccaaggtatttgaacaatcctatggaaatccagtaccagcttggctgacaccaagtgcatcgagtctggttgcatcctcaggatgcaggctctacctgctgctactgggatttccagaaaatatgtggtgctgcaaggcctttcaggctgtttcatttgtttgctaaactgtgtgacaaactctttaaattgggacctaatttaataatggatttagacaagcacgcacagcccataacctcttagtgagacaacttgaagtaagggaagggcccagggtgaacctcattctcaacacagttagtcgttctattcctgggaactaaggcttgaagttatgtcaagagcagtctcaagaaaacacattccatcctagacacttcgcctttgagcttttgttctgggggaagggtggtcccacctgattgattttggtgggagggaaaagctacatcatcatgcaggtaagacactctggtcatttatttttctctatagtagcaaacatgtcttttcactctacttcctgccccatttaactgctggttagtatcctggggatgataaagaagagtgtggaatggcaggattcttcactccagtggtacaagctgcttccagcttcacttggcgatggatttcttgagaacatttaaggcaaagccataaaatccgtggactgtgttataagtcacatttttgtcttcttcccctccaatcttggacccaacatgttggctgtttcccagagaacatgccacagttagctgtgtgcacccccctgcccagtacttggcacagggctagctgacagtggtatttttattgcacacattcatttcctcataattcttatttagcaagatcattagttattcacttagaaacatattgactatgatatgttgcagcagaataggaaatagaaacttcttgaattcagaattacttttctctcttaaaaacttagtgggggcaaaggtaactgggaggggaacatgatcaggtacctgaaacagtttaacaggatgaagcaggaagtctggacagagtctagacttgtcaaggcactggttaaattcctattgattatataacttctgttttatactttgtactgatttcctccaagtagatctggcttctcatccagaattcataacttatcgttatggataatgatagtcgtgcatagcttattgtttgctaaaacytgagtgtcacatttataaaatggacatagtacctagttcacaggcttgttgttaggatgacgttaaactgaatgtatgaaggaggctgctatatgggacttgttaggcaaaggggagttccttttattgcttcaagtacttagagcctgcctcctaaactggtgccttctttaaagcagaatagattttgattcttcrtttatattttsagacccattagcataatgcttactctttcagggatttgcatttttagttgtatccttaattgtggaataaaaggctttgtctttaggcagctaattttatgccagaaatagaaagaaggaggagtcattgtggatctgggagtttcctctttcccctgcaatcataggctacctgattttaaaaggtttttaatttttatatttctgtaggaagaggaacaaaagtatcataagtgactcttccattgaccatcacgttttcctccattcttctacttcaaggtctagaatccagatctcattactgttaatggttggcctgtcattaattgattcatccagaaaacctcttctgagccacagacctctacctcacactctgctagactctggaaataaaaagattaataaaacttcttttctgccattaaggagcccacagatcattcctacaacctagattctgcttacctctccactaatcccatggtaatcatatttccagaaatctctcatctccrcaggaggtactttgcctcataacccaaaatgactactttctagaacaaacyagacagctctagctaaaaaggagaacagaatagtaaaaagtaagacacagaatgctcacaggaggataggtgagaggggagggcatgaaaaawttgagggagcttccctcttccccctgcccaactgccaatcatgtaggttaggttagtttcaagggaacaaggaaatagacagaaatcacttgtccttaagtctcagtgtttgaacagtgtctgacacttctttaaattaactttaaatacttgtggaatgaactttttgattagcagttaaagatgatgattaaatagaaagtggtattaagagagccaccaatgattgctggagtcaagcacatgctcctctgttttcctgtggaccacacacagaacagctctcctccaggcttcacgtgctctttcctgtctgttgactcacctgctccctccattggactgtgagtatctcgaagrtggagatttcatctccttaaattctgcwtccggacagtctggcatatagtaactgctgaatcaattaaaatgaatggattacagatgtcaccaaattggagagagtttaactgtatttaatattttacctaattatgtcatggcttgcaaatggtttactgactaggctccttgccccttgttaatcaaattaatatggaaccctatttggtaatcatctcagattaaattttcaaaaattatttaaccagagtcactattcttatatcaaataaaatagactttaaaccaacaacagaaaaaaaaagataaagaaggatagtacacaatgattaagagttcaattcaacaagaagacttaactatcttaaatatatacacacccaacattggagcacccggactcataaaaccttctagacctatgaaaagacttagtcacgcaataatagttggagacttcaacaccccattgacagctttagatcatagacacagaaaaactaacaaagaaattctggacttaaatttgacttaaatttaattcttgacttcaatgtgactgaaccaattggacatctacagaatactccacccatcaaacacaggatatacattcttctgatatgcatatggaacatattataagattaaccacaagttcagccataaagtgattctcaataaattcaaaaaaaattgagatcttaccaaccatactttcagaccacagtggaataaaaatagtaattactaccaggaagatctctcaaaactacatgattacatggaaattaaacaacttgctcctgaatggcttttgggtaaacagcaaaattaaggcagaaataaaaaaatatttgaaataaatgaaatcagaaatacaatatacaaaaatctctgggatgcaacaaaagcagtgttaaaaggaaagtttatagcactaaatgcctacatcaaaaatttaaatgtcgaatggacagttgagtttgaagatgcccagagcatatggatttgtgattaaattgagagagtccctaatgagttgtgatcattacagttgtatgagccaggtccctgcctctcttgttccaggatagattctacagccagcatagctctatgcctatgaattcccacattaaagagcacagttgaagtgcctatcacacaatgggttgcccaggacctgctacataatttgcaggggcccggtgcaaaatgaaaatgctcaattcttgttcacaaattaatagcaaagccgggcatggtggctcacacctgtaatcgcagcactttgggaggctggggtgggcagataacttgaggtcaagagttcaagaccagcctgggcaacatggtgaaaccccatctctaccaaaaacaaaacaaaacaacacaaaaattagcctggcatggtggcaggcacctgtaatcccagctactcgggaggctaaggcaggagaatcgcttgagccatggaggtggaggttgcagtgagctgagatcttgccactgaactccagcctgggtgacagagcaagactctgtctcaatcaatcagtcaatcaaaataaaaaattagtagcaagacagtgagagcagagcataatgccaggtgtgggacgggggaacacaggtctcatacccatgaagccattcctgttgacccccgacttaggacatttaattcaaaactaaaagcatgattattttccttaatatgtagtatagtagaggtaagaaacacaaaatcagcactgggaacattttcaaggatccaggccttattctttttctaaaagagtattttttacaaattaagcatatgcctgcttttatgatatgtagaaacattttcttccagccatcttcctgcttgagaaactacattcccacttgccctaaactgtcaaggggccactttgagtcatctgtcttcactaaagcaaatctttcaaaagctaagtagcatcatttcacatttatttagcacctgcaggacactttggtcttcttgttctgcaaaagtttctgcctcttggcccttctcttcaggcctaagttttaaagaaaatgcataaaagtgcctcagatgactttgaaaaacagtgagaccggttggatgcttgtgtccttcccatatgtcattgccaaaattcagagggtgcaagatttgtaaattcccctgactggcaacattacaattaagaaaaaaaaaatcatggcgttgatagggaattgacaactaaattgcaccaagtaagaattctaaaaataataaacaaaaaggcaaattataatatatatttgaattggttgctctttaatattgccatcattttctagaagagagggcattttaatgccagaagaaacttatgaacataatctragcatcagaaaaagtcctccaaatattataaatttgtagttttaaaacctcactagatagatctccatattttttctatccatataatcttaccttatagctaaaaaaattaaagtaagcatcatgatgactaagttgtttaattcttaatcttgagtattttggatctaaatcattctaagatccttaggaatgcattttttttttttttttttttttttttttgagacggagtctcgctctgtcgcycaggctggagtgcagtggcgggatctcggctcactgcaagctccgcctcctgggttcacgccattctcctgcctcagcctcccaagtagctgggactacaggcgcccgccactacgcccggctaattttttgtatttttagtagagacggggtttcaccgttttagccgggatggtctcgatctcctgacctcgtgatccgcccgcctcggccttccaaagtgctgggattacaggaggaatgcatttttttaactttgtccttttcttgacaaagaaagacgtcttttagattttctttttctttgtgtacgtatgctttcttcatcttttatgccattttctcaataaataataagcccagacccatcttctgtgataagctgatgcttttcagtgatacttattaaaagataaaaaggaatctttcatcatcaaaattatttttcatttttaaagttgtcattctttctacattttaaaacagacccactttttgacagctttattgagatataattgatatgcaaaaagttacacgttttatacatacaattttgtgtgtttaaaaaaacagattttttttaaagatatcatcacattatagtatctttcattgtattttataacattgtatattctacattgtttcaaaccagattgcttacctcatgtactttttccccttaattgtcttaaaaggcagacatgtcctttcaaactcaggattccatacttttatatatatgaaaaaacatacaattatctgattccacaggtaacataatgagaaaatgtggtgtgaattgagtataagtttgcaacaaacagggtatttaatagcttctaatgccctctaacatgaaaatctaattctcatttaaattaactttgtagctcttactgtagacaaacctctttactagttccagtggcttctttggagccagtgtcathtttttctgttaatgagggttcctaggcaatcatcaggaaggggtctctgcttgtgtttctggttgctgtaaatccagatgagtggggagtttctccacctaaaaggcctatgctgaatgaacaccattgctggctgttcataagataacttttctcttttcctaaaattctgtgttcctgcccctttcctcataaatgggggcctccatgatacttccrcctccacaacacactcaaatcctcttatgagcccttgattacatgatagattcaagtatcctgaggatgaggagctggcagtgaacatttaattctcacagtatctatgagggagcatcattactattcccattttacagttaatgaaaccaaggttagatagctgaagttatcacccatatttacacagcaaagaaggacaacatgataaaaactcaattctgtcctatgccaaataccggctcttaaccttaatttccatggcttctagaaataccacattttcttagatgtatttgatttcatatatgctctctcattcctgtaggtacttaaaattgttaaagcaagttctataagttttgggaaatatagtcatctaatatatagtgcaactccctcagtaataaatgaggacgttaaagatggtcagtgagtasatctttgacatgaagttatactagttcagatgtaaaccatgggatgcattcgttgatgatgcatccttagcaaagaggcatgaggtttcctgctacaggatgctacacagaggataagacgattgcaggatcttctgactgccttagagcaagtatgatggaatggatacgggtttaagtttttcttcagtgagtattaattataaaatactacataggatgctgtcaggggtaaaaagatgaatcagacatgtctttgaggatccagctgaagttagttgcaaaaaaacagaggaaaataataagctattattgtgaacacaaattctgctccaggatctgacacctatgcagagggtaggaaataggggagatttgagaagctaactatgatggagtctcttgtagtaggttccaaaagcaaagctgtatttttgttgttgttgttatctttggcagtatatttcccctccataggaggtatacactaccatagaatgaaatgwtaagtcctgtagaattctaactcartcagccatgcatttatgagttcacagcagagtagagtaggccaaaagcttgggttctggagtcagaaatacctggccttaaatcctggcttggccacttagtacctttcttatgacctcagtaacatamttcttctccctctaggcctccgctttttccataaaatgggtataatagaaatactcatttaaagtttatgaggaataacgtttgtaaatcacctagcgtcttatacaaactatttcagaaattagaaaagagagggtacttcctagctttttacaatgttaacatcaccgtgataccaaaacataacaaggtcattgtaagaaaggaaatttatactccaatctctctcataaacatcaaattaaacatatcaaatattagcaaaataaatctagtgatatatattttatatctagtgatatattttatatattagatgactgtatttcccaaaacagaaagaataatattatcatgacctgctggaatttattacagaaatgaaagaacgctttaacattagaaaatcacattaacagaataaaagataagattcagatgatcatctaaatattacaggaaaaccattcaataaaattcaaaactcatctgtgaacaaaagttcttagaaaacgtgaaaaataatgggcttcctaaatctaataaaaggcaaacattgtacttttttttgagacagagtctcactccatcacacagtctggaatgtagtgccaagatcttggctcactgcaacctctgcctcccctagtcaagtgattttcatgctttagcctcctgagtacctgggactatagccatgcaccaccatgcttggctaatttttgtatttttagtagagatggagtttcaccatgttggtcaggctgttctaactcctggccacaagtgatcctcccaaagtgctgggattacaggtgtgagccagggagccagcctaaacaccatacttagtaatgaaattttggaagctttttccctggaaacaggtatgagacaccttctatcactactctacccttctatcactactgctattaaggggaggtgcaagaaaaagtaagatgattggaaggaaaacaataaaatgatccttattttctggtaacataattctgtatgtttaaaattcaaaataactagatagactgctataattaaaaagtaactttagcaattttactaaataacaaggttaatatcaaagtaatcagttgtatttccatataacaatactaaacaataagaaaactaaacatatcattgacagtaggagtgaaaaacattaaagtcatagraatagaactgacaaaagagcaccactatacaaaaaagccacaaatgttattaaaggaagatgcataaatgtggggtataccttattcatgaataggaagatgcaatgtggcaaagatttcatttctcccaaactgatatattgattcactgcaattcctatcaacatctcagaagatattttttatttatttgttggtgatggtgatagattagacaaagtgattctaatattaatatggaaatataaaagaccaacaataggcaaaacacagaaaaatgaagtcagagaatttacattatatgatgttaggatttattatgaggttacataattacaggcagtatgaaattggtataagtgtagacaagtagaccaatggaataatatagagtgcagaaacaataacacacacatacaacctcttgattttatgacaaaagtaaaattgctctgaagtggaaaaggatgatctttttagtaaatgacactgcatcaattggatatccaacttttttaaaaatggctcttgacccaacctcacactatacacaaaaatctttctacatggattatagataaaaatataaaatgtaaaacaataaaagtctagaagataatattgaaaaataacttcctaagtgtgtgataggcaaagattaagtattaaacaggcacaaagcatactaatcacaaaggaaaatattgatgaactacattaaaatacaaacctctgttcatctaaagacaccatgaagagaatggggcaagacagagcacaggaaaagatatttgtaatccagacatctggaaaagaaatttatcttcagaatatgtaaagagcagctacaagtctttgagaaaaaaaaaacatttttttttaatggacaaaagacttgaacaggcatttcttaaaagaggatatgtaaaacggtcaattcacatgaaatggtggtactcccagaatggctaaaattaaagactgttcataccaagtgttkgtgaacatgtagagagtctcaaacattgctcatgggaagtaaaccaccacattggaagattttttgtcagtatctatcagagccaaacatataccctatgatctatccctaggtatatacccaatagtaatgagtacatgtgttcaacaaaaatatatacagggatgtgcatggcagcattgtttgtaatagcctaaacctgggaataaccaaatgtccatcaacaatagaataggtaaataaattatggcatatttgaacaaaaggataatatacaacaatgaaaatcaataatagcagataggaatcttgcaaatattatattaagtacaataagccagacacacacacacacatacacactactatatgcatattagttttctaggctgctgtagaaacaaatcaccacaaatttaatggcttaaaaaaacrtaattatcatcttacaattttgtatatcagatgtccactatgggtctcaccagattaaagtcaaggtatcagcaggctgtgtttctttctggaagtttatttgaattgttggctgaattcaattccackcagttgtaagaccaaagtccctgttatcttgctcctgtcagcctagggccatcctcttctagaggctgctgcattccatggctcgtggcccccttcttccatcttcagaatcaacaattgcaagttgagtgcttctcatggcgtatctctctgacccacttgcaaaagatactctgcttttaaggattgatgtgattagattggatccacgaaggataatccaggataatctccacatttcaagtttcttaaccttaatcacatctgcaaagtctcttttgttatgtaagggaacatattacagattccagggattagggatgagggggtgttattctgcccaccacaatatgatttatataacattcaagaacaggcaaaatgaacccatgatgatggaagccaagagcgattatgacccttgggtcatgytgctagaataggaataacagtattcattttaataaagcgttgttgcaagtattatagccaacagtaatgtcaattgccttgtaaagtgcctgtcacaacatagccctgttatttgtcatttcctgtttccttcccttctcccaattccaccttcatcatttcacctgtaataatgctgcagtcaggacttcgatgcagaataagatattctgaagacttgcagaccctctgtaatggtgcttcctaaacttgcctggtaatgaatattcctcagaaatgaagatataagcaagaaccccaggtgctgcttaggtaaaaggaagtttgggaaacactgcttttagaaatttgcttacatgaaacgctgttgaaaacacaaagaaatgctgaatgatctgccctagctccatccagaataccacttgctaccctttttaagccacccaaagcaaatcagctgtgctatgccattgaaaaacaagtacttcttaaaatattggactaatyagataggattctagaacttaatcttttgctggaagtatcagtctgtggttctaaggatctagcacagaacccaaacagaaagttgcataaatatttgttaagttcactgaaattaaagacggcatctggttggtttgttgttgttgttgagacagggtcttgctctgttgcccaggctggagtgcagtggtgtgatcacggctcactgcagcctcaacctccccaggctcaggtgatcttcccacctcagcctccctactagctgcaactacaggtmtgcaccaccaggcttggctaatttttgtattttttgtagggatggagtttggccatgttgcccaggctggttgcaaattcctgggtgcaagcamtccacccacctccgcctcccaaagtgccgagattataggcatgatctatcgctcccagcttgtttattatttttttctattaaagcacgctgcagttgcccatgcgcatgacttcttgaatgtgctaagaaagaaatctggtaaaaattgagtctctgtaacattcatttcacatactcgacctcaaactttttcattcattcgttttacaaacaactgttgatatcccatattgcagacagttagacatgtccaaggaatacaaggataaaagtactcagtccttgctttagggtactcccagtgtagtggagggaccaataataaaagaacctccaactccacctccccaccctacactgaatttggaactcacattgatcaagagcagggagccactgccattgtaaatcaggtctcagcctstttcctacttcatcaagttcacactggctttctttccagggaggggccaaaaaatcgccttgtttactagctgcctctctgctttatctcattgtatctcaaccttagctcgaggtaagaagcacctgtagagctcttcaaaaccttgatgtctcaccccagcccagacctactctaaatcagaatctctgggagtgggtcccyaggcattagtgtttttaaagctttgctagtgatcccagtatgcagcaaatctgagaaccactattttatcttttctttctttttttggtttcttttctttttaaaaaaattayctttacttcctcagctcatgtttaagctgaaaataatcatttctttaaagtctcagatttcttgcatggaagtctagtgcaaacctgcagctagctaatgagaaggccagttcctaaaatgactttcaattttaatcacatttaacattagttgactcagaatttggaaaccaaccttgaatctgatgctacaatttgctaacactcagcaaaaatagaaccccctgtttcaaaaataaataactttgtaaaacagattgaaaaggttggtaagatttcttgaaaatcagagttctcacatttacattttgatttccagtgatgaaatgaactgattagaaattcttaattttcatgaggtccctttgaaaatgttcagagtgcagctgagcgccaaagaacatattaatagtttgagtgtgcgcatatgtgtgtgtgcacatgtgtatatagcaatgactgggcttgcagtaaattyaggtacaactaggtttacccaatcctcatttctggttctggttcttactgctccagtcttcccgactccatagtacactgctcctcactccccttgctgcctgcctccatagtttgaccctaaccctagyttttcccctctgtgttcttgtttacccatgccactcccctgacttaggcttagcctatcccaggcctctgcaattggttggcatggaaacattaggccagcctgcctggtgggagggatgttctgtttccacgtgaaaatggaaaagattcaagtgtcattcgcttccagccattttaacccttgagtttctccatctatttaaaacatacccactgctcttgatcaccaaataggtaaagaagactattttaacttggactctgcctacctctacaccctcctctgctgcttcccctaaaagccctgggatggagcctcaggaagcactttgttccttcatttctcctttcctttgcacaggccctttcttcaatctgcatactgtctcttcctccttcccattcagtttatggggttcttaatggtttttcaagactccattcaggcaccatgccttcctagaggctttcacctctgcacctactctcatagcacttccgttataatggttgtagaaaattccaagattaagggactattttcctccctagatggtgagtttattaaaggagaggyatgctactgtgaggagtatgtttctcatactcctggggtgagatcttatctctgttcattactagaattaagatcttgcacaagtcacttatctttttaagcctcagttttctcatacctgaaatggaaatgatggtacctaatatgcctactatttatcagatgctgactatgttttaggcattttctcatttaaycttatttaatccctacaccaattcggtgagagataaaacattattgacctatttttacaattaggaaaatatggctcagagttgagaagcctgttctaaatcacacagctcttaggtggcaaagccaatagtcaagccaaaatctaactctgttactctgctctagtgcctgtatatgcaagtaaagcacctagccctgtgcctgcccttgaggagggggtggggacagataatggatggaagaattagtgataaattgccttggaaaaagtatgatcctaagcactccatggggatccaaatggaaaattaaactctttcctctagtctaggcctaatgtgcaccatttctccaagtgtgtggtaaaggtcaagtatataagacttctatcacccatgtttatacctgtgtgctacttcaaatgcatgcttccctcccgctcaaacagttgcccccccttcaaaagcagctaaaggtaaactggctcctggagaactgaaaagcagaaagaaatgatctttgaatagctattaaatcaccttgacagctgccacctggcaacaagccctcagtgtcccctgttcccgtccttcagttcagtatcagtcccttactgcttcagcggacaaagaagagaatagttaagtgagtcccatttaaggggacataattaacctttagaggtaatcattcagtaccattcagtgaatttctataattttcctttctaactggcaatttagcaaaagaaaaagatgtgctgttattgaaataatttccatttttatgtacagataagtgtaaaagtcttaattaaaggatcctgtgttagagctgagtgtatgtaaataatgcctggagtttcaaaagcaaaaaacaaagcttgtcagtttgtctagggccagtcatcacacgatgtttgttttctatagcatgcttcactaatggatttggttaccaagattactcattttaaaattatagttctgaaattatcgaacagcatggcctcctacagaatcctggaagcagtgaattgaattctgtcatattgcctctctctgtctctctctctctcccccttccccccttctcaatatacatgcattaaacatatttccttttacgttcaaaagggctatgcaattgttttcccatgttaatacacataatttttttaacaccacagacaataacagttctagatccagtgccaaaactgtgattcactccagcctgcaacatagattagacaattagactattctttgtaaaatactgacttttattttagatctgattttttttgtggaaaataaaagaccatgagtattgataaataatgtttttgtgttaatttttaagcaacctgtacttgagagccagaatagtgatccatttaaaagatgaggttctttgataaaatgatgcatttaaaagattaggttctttgataaaatgatgtgggttttaatttgtttcttctgtttaccggttgtgtgatctggaaaatgttgttttctctaagtctcagttttctcctctttctattgtggataacaagagtaccaacctcataatcatgttgtataaataaaatcagatactatttataatatgcttagcatagtgttcagtctatatgtaaaagatgctcaataaatggtagtcattatttattattattattattattacctcattgcatagttgtgaggattaaatgagatgatgcattaaattgcttgacacacttctaggcagattgaatgtgcttaataaatattacctccattatggttaccacagatctgttaccctgtaactgttcgayagttggttgctatactgccagtccctaaagttcccttcttttccctctttgctttgtttacttctcgtcaaatcacagggttccacagatgtttaattagcttactgtttcccttttgctctgttttcaatcatgtctcacaagtcgaaacattcctttttcccacactgatacagattcgtgcagcaccatggacctagctttgagttgtggtgcccctcttgttagctgggcagccttgtgccaattacttccatttcyggcttttagatgtttttcaygtaaaccacatagataggaagaggtaaactctgggatcccttcctgtccgacatccactgactctcacgctcggttttagtcatggtcttggggacgctgcatagtacaggagcccaggtcttagagacctagtatttgtagtaaatataaacactggacatgaaaaggggacattcttaccagtagcatttcaatatttttacctagtgtgatgtttgaggagtgttgagaccctggggttacactgtcaaaayttcatagtatgaaaataattctcagctttcccaaaaggacaagcatttaaatccaagtaccaagtatttaaaacttgaccacatgtcctacagagagagtgatatccaacctgtatctatgtggctgcctttgcccaagaaaggcaaattctattttacatgaggacataattctgaattaataagaaaaattcagtagaaaacgatagggctccaacatggctagtttaggagcaaacttttccagcagggttttttttgcttggaaatagaaagggattatatgtcatgaatttcaaatttcaggttatttcaactccaaggttggcagagagattaaggatgagagtggggagaagggaggatgcatgcaaagatcccacacatgcccttatacactcctaggttgttgtcaataatgggaaatacattttcgtttttgggtttaaaatcaattgttagataatctcgtaaaatcagattctcctactttgtgtacattgtaactaaaactcaagccagcttaatgggaaatttcaaaattctgtcatttccagctctcagggctcctccatctgccctagttgtgcttggagccagaaaggagcacagagccagatttctcattagcactaaacctgttggaccaagaatatgacagcatatgaagccctgctggggcaggttggctacaaggctggaaatggttatctcaggtctctgaagcctgtatgttggtatagaagggcatgtctagggttaaaagattgcctggcttaggaaatcttctaagtttatttcaatttgtaggccatttgtgcccataatgaaataagtcgaaccaagggaagtactcttcttcttgccatctcctttttggtcactttcatctctgatttaattcatcctatgatttgatgtaaatattaggttaaaccatatgaaactatcaaggtttcatatgattcagcctagtattttactttaaaggggggcttctgtttgaatgtgctgacggcttgctatcatttggttggctagaaaggttcttggacagcagagggttcaaaatggtggctgtgtaatagaaatccaccatagtttgttggattttaaattataatgatagagctaaaaatgaaataaagcagttcattcattagcctgctgccccaacaaatagcataatcaactctgcttttagcttttatattagaaccagctgtagtatctgaaggatctctctctctytttctctctctctctcyctgtgtgtgtgcgtgtgtgtgtgtgtgkcctgatttatttatctgaagtataattatggattgctcctgatttatgatggcttgacataggatttttcaacttttcaatagtgcaaaaatgatacaygtttaccagaaattgtagtttaagtactcataaaaccattctgtttttcactttcagtacagtattcaacaaattacatgagataatcaacattttacaggttgagcatcccaaatctgaaaatccaaaatctgaaatgttccaaaatccaaaactttttgggtgctaacatgaaaagggaaatgctcattgtggagtaatytgaatttcagattttttaaagtacatatttcaaaatctaaaaaaaaaaaaaattgaaatctaaaacattactggccccaagcatttcagatgaggaatactcaacctatactataaatcaagcttcattgttagatgattttgcccactgtaggctaatttaagtacatttaatgtaggctaggctaagctatgatgtttggtacgttaggtgtattaaatgcatttttgacttactgatattttcaacttacagtgggtttatttggacacaatccatccaaaatcaaggagcatctgtatatacactgaaatgcatggatcaatggattttaataaaagcatgtatatgtagtcaccacccaggtcaagatacagaactttctaacaccccgtaagacgtcctcatgccccatttcagtcaatcctagaccttgtcccctaccctgagaaataactactattctgaattttataccatagattagccctggcctattcttaaactccatgtaaatttagacttgcagtctttgttctttcatgtctggcttccttggctcaacatgatatttataagagccatccatattgttttgtatttgagtagtctgctgctttttattactttatgtattattccattacatgaatataatacaatttgtttatccattcttctgttgaaggatacttggattatttccagtttgtggctcttatgaatagagttgctacagactttcttgaagaaatcttttttaaaagatgcattcatttgttttgggtatatccaggagtgaaattgttgggttataatcaaatactttaaataaattgctaaaccatttgctaatagtagttgtaggaaatgtagtragtgtccatgtgccttgctaagactctgtcgtggatggacgggaggagtcctgttactaaaagagaacagcggggacagtgggtactgggagacaactaacagaccccaccatagtgcccatagacaatatttcatgaatacattaactgagacggttcttctgtgaattgagagtatgagatttaaacatgttaaattaagtttagcctacagctgcctccttacatattttaagtttggcctaaaggtttctctgtacatcgtgaactataacaagtggaggtgtaaacagaccatagcctacacttgtgccaatcatggagttttggccaatcaaatgcagccaactatccaaaccgtgttcaaataaagcaaacaccaactgtaaccaatccagctgttactgtacctcacttctgttttctgtatgtcactttccttttcctgtctgtaaatcttatgccaccatgtggctgcgctagagtctctgagcccgctgtgtctcaggaggctgcccgatttgcgaatcgttcattgctcaattaaactccwttaaatttaattcagctgaatttttttttctttttctttttctttttttgagacggagtctctctctgtcgcccaggctggagtgcagtggcgcgatctctgctcactgcaagctccgcctcccgggttcatgccattctcctgcctcagcctcctgagcagctgggaccacaggcgcccgccaccatgcccggttaattttttgtgtttttagtagagacggggtttcaatgtrttagccaggatggtcttgatctcctgacctcgtgatccgcccgcctcagcctcccaaagtgctgggattacaggcgtgagctaccgcgcccggccttttttttttttaacaaacactaacgtatgttttcaagtagcagtagctctattcctttaaacagaggtcaactccgtgaagaccctgacaactgtatgggctgacgttcctaaagggaagcaaaattgttttttctgatttcaaagatgatgagaaatactagkggagatgttaaaggctttcagtacctctgatgcatctttcactatgataagatkgtttttagcttctggctgcacccatctaaggtttcctcactcttaataaaacaataaatgcctacggatttagatacatagatacagattagctaattgtttttgttcattatgttgtgttttaaaatttctttactgactacaactatagtatatatacatatattctataaatgttagcatatattagcatatatgctagtatgtatagtagtgtatactgactaccttttaacctctggttcctaagagcttaaatcctctgtggatctcaagtttgtgtaaatcttttaagtatgaaaagataatttatgtttttaagtagcagctcctccctttcttgaaaaggagttaaacaccaaagaatcaccgatgactctgtggaatgagtctaaaaagtagcataacaactagtatagtgaagtcactcaacaaatgtatgttcccttctcctagtatctcaagtcacagataagtaaatcacagcgacagtttagagcggtaaatgctatgcattatgagatactaatgtttttattgctacctttcatggcttgatagcagaaaaatgctgactgctgactgccatgaaatggaagaagtatgaagttctcacatttgtggacaatagkggaacactgcaagtactcttgcatgtattgttctgtgttccattcacaaacctggcttttgcagtcctttagaacatagctgataatatagaaagtaagaactgcaggaagcagctgcacctttaacttgctgcatgaccttgaataagtttttaaactcttcgagtctcagttacttcatatttaaagtgagtataaaaccagttcttatcccatagggttcttatgaagattaactaagcttattctggtaaagctcttcagaatattatgtggcacttagtaatcaatcgttgttgctgttaccactgttgtctcttctggagttatttccctggtcccactgctttagaaattagttgggacatttatgtttatttctttgcttgcttgcttacgtgttttgtttttttctccacgttattaaataccattgccgagtgggtcgtaaaaagctcatttcccctgttagaaaacacaaaattttaaccaatttgatttaaagattgaattggctttcattcatgaatcaggcagcatctcatccaaagacttagataaggcactcyagtgagctgaggagaggagattggctttataggcagaaaatggctcaagaaagcagaaatgggaaacaaaattgaattgggcattttaaagctgtcctcctcatagggttaaatcagaggaaacttccttatccttctggctctgttaaactgggccccttctgattggttgctgtgaatcaatcaatctctctctctctctctctctctctctctctgtctttgaaaactggtccatttcaaagtttgattatatggcacctaacattaatgactctattctgatttgctctggcctgttgggcctagtgcaggagcttagtccaaacaatagcctcccataaatttcatttaacaccctttgaatttaaaacaaaattttamattagtttttgtcttatagattttctttttttaaagcagttttaggttcacagcaaaattgagaggaaggtacagagatttccatataccctgcccccacacatgtgtagccacccccattatcaaaattccacacctgagtggcacatgtgttacggttgatgaacctgcattgacacatcattatcacccaaagtctatggtttcacattaggtttttctcttggtattgaacaatacatggctttagacaaatgtataatgacatgtatccattattatagtatygtatggagtactttcactaccctaaaaaaccctgaaatttgacaaagtgtatttttcagctcccagaaacacttgtttcagaaaaaagcaggtgaggatattcagttcctcaaaaacccaaagatgagttgaccaaaaatatgactccaagagaattgtattaaagaaaaatatattctcagaagttttattccaagaacacacttgaaattcaatcttaacttggtaacatttgcctgtgctggctggatgataaacacacttgaaataggtggaatctcttatgaataaaggaagcagtttgaagcattgtcattgtgaatatagtaaactgctgaagataaatttttctagtatatttggagtcttggcatgaaagccttcatcatcacagtgctgtctttttgtttttaatttagtttagtttagtttagtttaattagcttttcagcactttctgcaagcttgagcaaagatatkcatgaatatatttctgctaaaccacagtaatgaattatttattttgaaatctrtctatatttttagctactcataccagcagtttagagaaataaaaacctttgggatcttatatctgacttttctgaggtgaaatgtgacatgaattgaaaataaaagagaacagatatttgcaacttgcatagctggtaaaaaatcacttctagaatactatacatggagaactataaagcaatcagaaagattcaaacagccctatagaaaatgggtaaggacttttaaaacaaagaggaaaaaacacaaattacttattaacatatgaaaacatgcttaaaatcattgataatcaaggaattacaagttaaactgcaataaggcaccactcacatttactaaactgataaaaattatgaagtccagttgattccaagtgttagagaggatatgaaactgttagaattctcatccactgtgtcaactggaagaactactttggaaaacagtttaacattatttaataaaattaaaaatattactcagcgactcctttctttaagcatgtaccttagggaaaatttgtatacagggatagaagacatgtataacaatatatatactgatactgttaataaaatctaaagataacaatgtaagatggatgtatgagttatatttatacaatgaatataactgtgagaatgaatgaagaactgttatatacatcaacatggatgggccaaaaaaagaaagatagttagaggatgatttaccctaatttcaggagagttacttatggaagaagagtacttaggaaggaaattatataaaaaatggcatcctgagggaatctaagtcactgttaatattctttgtcgtggtgatcggtgtataatactattttatttttaaaaaattgtgcagagattttatatgatttattgaatatgcgatctatctctctcccactaccatcacttgtatgcattcattcacacacacacgaacacacatacacacacatacacacacatgcacacacatacacacacacacacagtcactgggttttatccctaaaacaaaaaaagatggtaaagcataggcctagaytgagtgtatggatatagaaaatagaatcatgaaggaaaataataagaatgctctttaaaatgtgatcatattgcctcagtttgttctataaataggtgagactgaattataaataagtaaaattggaataaamaatgataaactaattttgtcagcaatatcacatccttgtcaccatttcctgagcacttactatattcaggttctctcttcattttttctgttcttcactataccactatgaggcaggtaagaatgtatccaaatttacacagaggtgtgctgtgaatcaaaacagctaaaaaaaaattttgtccagttctaagactgaaacrtggccaaggagctgctctgaaattcagattcagtctgccgggcccaggccccattctctccattctgccccaatctctttcttggtttaacgttttctcctgcagggaggcagtgttagagatgaatagactcctagtcaaagtcttaggacaaatgatgtccttattggacttccaaccaccctttctttgttgtaactctccacaagaataagaagttcatattttcacaatattaggtgccatccactgccggcatggtgctgtaatytgctggaaaataatgactcagatgactaatctgtatgaacgcacatgcattttgcaaagtgttgtgtcagagcacgggtcaaatcaattaagtgttttgtaaggacccaattttcatactggaacaagttaaataattgactgcaatgaaaaatgctagggagagtttgtaagaaaattaattgaaatcagaaagcagaaagactcgctcatttccagaagtgatatttgaaatccagaaacatgtggttcattcatttcctctgtccrtgatttattcccactgcagcacattactctcttggttgctttgcaaaagtgctcaatcttcatccttcttcctgaggaagaggggtctgtggcaaagtgctttgggagctggagtctgattcaccaggacacagtctggtaggtctgtctctacaaagcagggttcgttctggtctcaataagcagaaaacactaagaacttggagaaccagaagcaaagatctgtgatcacagcaagttgttcttctccttaagaacttcattgacggctgagccctgtgcctcacgcctgtaaccccagcactttgggaggccgaggccggcagatcacttgagcccaggagttcgagatcagcccaggctgaaaccctatctctaccaaaaaaaaaaagaaagaaatatatacaaaaattagcttggcatgttggcatgtgcctgtagtcccagctacatgggaggccgaggtggaagaatggtttaagcctgggaggcagaggttgcattgagccgagatcgcaccactgcactccagcttgggcgacagagtgagaccttgtcaaaaaaaaaaaaaaaaaaaaaaaaaaagaacatcacatattactttgcagctgtaattctcatatttggctgattatacaarttgtttgagaagctaacaggtggttcaaacaaaaagagaatcgttggctccatccccacacttaccaacttaccaagtcagaacatcacagggtagctacatacatcacaggaattctayatacagaacaccttagggaattaaactaagtttggaaactactagcccatatagaataatgcccccaactcttcggcatggcattgaggacccttggcaaagtaatctcagtgtaccccacttcccctgattatgaggggaagaactctatttctcttccaacataaagccataggactttgcattcatttcttcagtaaacatttattgagcatctgctatgtgccagatttgacaggtattatagattgtatcttactctatcattgcatgctcttagttgagttcagaacttctacactaagtaatagcacagcctggcttatgctaaatgacaactgaaacttctaccaaggatagtaaatacctataggcaatgcttccctcaataccagaacagacattgtttatcattgcactcggcattcttcccactgagtccagagacaacttcagaagctttctcaacagcckctatcacaccatctgctttggcatgtgaggcaaagtctgtttgcagcctctgttatagcccatgtttgacaagactaaactaatacccttcctccctccttcactttcactgaggtgactgaacatgtgctcaggctttaggaaaggtaggagttttcagagatagtcattgcttctgagattggtgtgtgggcartaatgcascccagggcagaggccccagtctgcacatctctctgtacaggagggccgtgtatttgctattgctagactaagaacatggatgacttttggcactcagacactaccctctctctcttcctgtctgccttgactgtatgtagctacgatagtaatccacagcatcaaacaagttttctaaaagtcccattaaatacaggctgccaaattttgtgattcaattttttatattcaggaatggactttaagttgtgatagcagaaaaggagatgtataaaatttctcaagagaaacattgcattcttgtcttcacaggctggttccaataggaacaggaaagagtaaaatggagagctcagctggattcacacagacctggaattgaatgtcatacacacacacacacacacacacacacacacacaccctatagctagctgtgtgaactcatcttttcctcatctttgaaaaaaataggatgtgtgtgtgaataatctctctatcatgagcttattttaactggcatagacgtatacatgagcctcttaaatgccttgttgaccatgcctttatgttctcagtttctggcccagaacctgggacattagggagggtttcaataaatgtcaatcacatcagattacactcagcttatctgtaggcaatttatctaacaatctcaaggatcaaaacactattaagaactaatcagtagccaaaataaatgttcctagaaatatagattttccaagctcatgaacttaattcaaagatatctctacagcccctcatgcaaaacctatttaacattagtttagttcttccaaactactaatactgcttttcaactcactgtaggttacagataggataatgagagcaagagagaaagagagaactrgtaggactcaaaaagatactaaccagtgattatagagtgcctgccctgtggttggggcttgataaatgacacaggatcttgtcctcaaaaaacacaatgtctagtggcggtgggagttacacaggtaattccacagtattacgctgttatgaagagctattcagtgccccatggtgtcacaaagaaaggggtaagtggtcactcctagtcagggaattgacaaaggaagggcaagatgggtttcctaaaacctaagatgctttttggatcttttgaaggattggtaagtgtttattagaaaaccaatgatagggagggaggcgatagatagttgtccaatcagacgtaacagttttccaatcagaggaagctggataagcaaaagcaaggaggtgtgaaatagcctaaggccctcaggaatctatcatgcaagacctggttcagcatgacagaagcctactctcctctggaggggttaggcatgagggaaggggaagtccgagaggtgataaggtgagctcacagaggtatttacatacctyccatgctgaatttggacttaaggctgtagttcatagagagccattgaaagaattgttttgtttattaagcaagcatgtcaagtactcagatgtggttttggaaaaactactcttgctaagtgccaaggaaggacttggggatgctgagaataggaataggaaataggggaacctgtttggctgctgcagcaatccaagctagaaattgtgaggccctaaactaggcctaagcaatgggactggagaatatggggcagatgaaagccagctggaggtaaggccgcaggatttaaatgtgtggcagatttagggcaggggcagacagctttatacacctcagtagccttgaagatactactgcatgatacacagtaccaaaaatgacatgttgaatgatagtcatgagacttcagaagaatttaaattatgttcagtatactctgtttgctaaagcagtgaagcgtaacatctattttagagaaagttctgcctgaataattcatttacatttaatatatgactcccaaagatcctaataatgagctttagtgtatatraagatctaaagtttattaagtagctagtattaaagggtctctatcagtatattacctcatttagcctcaaaataacctgctgggaaagtactcttgaatccaaatgcagatgagcaaccctaaagctgggacagaggaaatcaatgtttgaagatcacacggccagcagtattagaaccattttgacttaaaaatccagactctttctactacactgtcattagcctaaacttttccaataagcagccatattctgactgaaatgagaagctattaaatattgtaaaactgaaatatgtgcttggrgtttgttgtcccatctttcactttaagatggtgctcaggagtttctgaaacgttttgctgggaatgagtagacgatgataacttctctgaaagaacagccaaagaggacagacagaacatgcgtggagctgagaaaagtattccagtaacagttgatctcattttttttcccttctcggaaatgcagaattaaacctgtgccatcttgcccatgcaaaacacatatcctctgaaatgattttgagatgtaaattaattcccaccccggagcaaatagcaaatcaaccaggcaacctagtcctgtagactaaaatagggagcatcagaccatgactctctcttgcctgactttgggatcctaaacaagccacttaattgtcctatgcctcagtctcttcagatgcaaaaggaagatgataatattggccttcttaagatgttgtaaagataggcataagaatgtcagtattttgaaaggtcaaatattcttacaattgtagagtttatttttattctataagccagttttggtttttgtgtttgtttgtttgtttgtttgtttgttktgagacagggagctcactctgtcttccaggtgggagtgcagtggtgcagcctcagctcactgcagcctccgcctccaaggctcaagtgatcctcccacctcagcctcctgagtagctaggactaaggaacacaccaccatgtctggctaatttttttttttttggggtagagatggggttttgcctcagcctcctgagtagctggggcgactataggcacacactaccatgactggataattttgtttatttatttatttaattttggtagagacggggttttgccatattgccctggtctcaaacttttgggctaaagagatcctgccacctcggcctcccaaagtactgggattacaggcatgagccactgtgtctgaccaagttttaytctatgtttcctagattaaaaagtagaaaattttatctcattctttttattttcttcaccaaatattctttgagcacataccatgtgtgggtacagtggaggcacagagttgaattagagatatatcccactctcagatagctcatgatcctgctacttaattttgatgtctcttgatcccgctcatgagacatgttgatcatgctgtcactgatgttacctaatttaatctttattttatcttttgaagtaggtatctatccatccctattttatagatacaactgttgagccttggcaatgactgaactggaactaaccccagttattctgactccctaaactcagatctcctttgatcatcacagaattgcttcactgtctcagtgaagaaaacaagtatattcataatgagctccggtaaaaatctgatgacartgaggaatctaaggtaggaactaaaagctatgagaactgagagaggagaacaattaattttagattaggtcgattctcagaatgtattttcataagaagaaacatttgaaatagattaggaagaataaccagaaaaaaacagaaaaagaaaaaatgataagcaggaggagcatgtacaaaagtgtggagatgaacaggtaaatgttatgtttgggaacaatgaacataatgggattaaaacgtggaaactgcagactgaatttttttaagatagattaggttcaggtgaatggaatcttgaatatcatgtaaagtaacttgggactctaaatagtaaggattttgagcagaggagtgatgtagacatattggtgatttagaaattatcccaatggcgatgggaaggatggatcataggcggctgagaccagaggttggtaaaccagttggggattattataataacataggcaaggataaagaaggacctggattaaagcacaggcaatgggaataaatgaagaggagcaaggcaacattctaaattatattcaatagtgatagcaatgttagatttgaaggaaagggagaagtcaatgatgagcctgaggtttctggcttgggtggttggatacacggctatgtcattaactaggaaaggaaacacaggagaagaagccagtgttatgggaggaaaattattttttattatgtcaactttaagggagggaagaatggacatcctccccttacatcagatcattgaagccaactttgatgatttgatgtgatgacagtcatagtcatagttaaatcttaatcttaaatcttgttgtttttgtgcatattttatttgattcagttatattgtttgagctaattttagggttaaaataaggtccactgtgctgtgagacttttatgttcagatcatgttcttgccaatatgcaaaacaaaggaataaatgcattttaagggttgtataagtttcttgccttaatatctgcaaatttatttgcatctgggtaacattttgatatattgtcttataatgcacctattacgacatcatctctacctaatcaagggcatagttatgagattaagggccagtaaattgataatggcagacttttgtttgtttttgaaactcttgtcatccattctttttgttcattacgttcttctataaattgtttgcaatgtgatactttacatgttaaaatgaacttgcatttcggttagatggtgtctccaaaaggctggagaatcaaagactgaaaaaaataggagtaattcagtttgctgaggatcagcctgagaccgcatcagtaacagcatttttagttccgtacaaagtaatttggttgtggagaagtcctacagcaaatcagcctgaattgttcagtttaattgtggtcacagagccacttgtgcagtaacattaattacaatgaatgttttagccattaaagcctgccattaatttggttccttagatggattcttaatggtaagaaaaatgaggaggatgccctgtttatctcatttaatgcctggaacacagtaagttatcaacagtttgtcctcagtttcctcaactgcaaaatgcaaatgataatagtccttacacagctggattttgagaattgtaagagaaaagacttaatacattatctagcataaaagcacttaatgccttcattaatagttgaaaccccagtgcrgcaatgctttatttaatacccaagagctgggagaaaactcacctcacattttatttacatttgagaaacaaagggcctagaaagaagtggttttttttcccataaatagatttattgcttgtaaagattttttgctctgagataatttaaataacttctgtagtcagaatgagcttttataccatatgcattgataaaagaatatgtctaaatatctgtataatgtgaaaagctgagaaactcattaccaccaygacataaagccattaggaatttcattaattgctgtggtacagaaagtggaagatctaccttttagttcaaactcagctcagctgtatggagcctaagcctattctatttcttcctaaaatctggaccatctttaaagtagggacgagtgggagcccacttgcttttgctgagaaattccatacaaaccttccaagaccaagtattgcaactctcctgggaatggacatttcacaattcccatggcagctcaagaattagaagcaacccaaagccacctcttctagtcctacccttccttcccatccaatttataaatcctcttctaagtatcctttatacatggcttctcttcaacaacctctattcttagatagttttccctgtatttaatataaaccttgattgcttcaatgtacgacaatacagcctctaattttatgctttttggaccaaatgaatgttctttaagcatgtygtcagtttaaacaagatcatgcatctgaaatgtctgtgtaaattatacagtgctgtataaaattactcaagactgtattaacaaagctaagacaggcaatgatgcaacatatttcttaaatgcaacaatccttaaattagcttcacacataaaagtttatttctcatccacagtacataccaatcagggcttgaggaagggctctgctccacacagtcactcagtactcacaatgatggaggggccacaatcttagagctgcaccattagaaatcagttccttgatagccaaggcagaagagaaagggttgcatcctgacacacttgctcatagaccattgactgaaacatgccacagggccctgcctaaagggtccaggaaatacagggaacagatcagtatttggcaagccataattgtctctttccyagtatttctgtcaaggctaagcaaatctaagggccttgtatttttttacttcycattttaaccttttatttgctattacacttacctaggtttacttttggtttacgatatatatagccattttttaagtagtctcaataaggacttattcaatgctatatggagaaaaggaattattgcatgctgtttaatctgtcaaatgacagcactattttatctttttttttcaagcagtgagaatattgtgacttggagaatattataattttatccttatcagctaggcaattttatgttcgtgtttttacaaatatcaacttcatacttgccaggactggatttccacatgatttttatagagagaaatgatctctctatataaattctttttttttcttttttttttaatatatttcttytttttattatactttaagttttagggtacatgtgcacattgtgcaggttagttacatatgtatacatgtgccatgctggtgcactgcacccactaactcgtcatctagcattaggtatatctcccaatgctatccctcccccctccgccaaccccaccacagtccccagagtgtgatattccccttcctgtgtccatgtgatctcattgttcaattcccacctgtgagtgagaatatgcggtgtttggttttttgttcttgcgatagtttactgagaatgatgatttccaatttcatccatgtccctacaaaggacatgaactaatcattttttatggctgcatagtattccatggtgtatatgtgccacattttcttaatccagtctatcattgttggacatttgggttggttccaagtctttgctattgtgaataatgccgcaataaacatacgtgtgcatgtgtctttatagcagcaagatttatagtcctttgggtatatacccagtaatgggatggctgggtcaaatggtatttctagttctagatccctgaggaattgccacactgacttccacaatggttgaactagtttacagtcccaccaacagtgtaaaagtgttcctatttttccacatcctctccagcacctgttgtttcctgactttttaatgattgccattctaactggtgtgaggtggtatctcattgtggttttgatttgcatttctctgatggccagtgatgatgagcattttttcatgtgttttttggctgcataaatgtcttcttttgagaagtgtctgttcatgtccttggcccactttttgatggggttgtttgtttttttcttgtaaatttgtttgagctcattgtagattctggatattagccctttgtcagatgagtaggttgtgaaaattttctcccattttgtaggctgcctgttcactctgatggtagtttcttttgctgtgcagaagctctttagtttaattagatcccatttgtcaattttgtcttttgttgccattgcttttggtgttttggacatgaagtccttgcccatgcctatgtcctgaatggtgatgcctaggtttttttctagggtttttatggttttaggtctaacgtttaagtctttaatccatcttgaattgatttttgtgtaaggtgtaaggaagggatccagtttcagctttctacatatggctagccagttttcccagcaccatttattaaatagggaatcctttccccattgcttgtttttctcaggtttgtcaaagatcagatagttgtagatatgcggtgttatttctcagggctctgttctgttccattgatctatatctctgttttggtaccagtaccatgctgttttgattactgtagccttgtagtatagtttgaagtcaggtagtgtgatgcctccagctttgttcttttggcttaggattgccttggcgatgcgggctcttttttggttccatatgaactttaaagtagttttttccaattctgtgaagaaagtcattggtagcttgatagggatggcattgaatctgtaaattaccttgggcagtatggcaattttcacaatattgattcttcctacccatgagcatggaatgttcttccatttgtttgtatcctcttttatttcattgagcagtggtttgtagttctccttgaagaggtccttcacatcccttgtaagttggattcctaggtattttattctctttgaagcaattgtgaatgggagttcactcatgatttggctctctgtttgtctgttattggtgtataagaatgcttgtgatttttgtacattgattttgtatcctgagactttgctgaagttgcttaccagcttaaggaggttttgggctgagacaatggagttttctagatatacaatcatgtcatctgcaaacagggacaatttgacttcctcttttcctaattgaataccctttatttccttctcctgcctaattgccctggccagaacttccaacactatgttgaataggagtggtgagagagggcatccctgtcttgtgccagttttcaaagggaatgcttccagtttttgcccattcagtatgatattggctgtgggtttgtcatagatagctcttattattttgaaatacgtcccatcaatacctaatttattgagagtttttagcatgaagggttgttgaattttgtcaaaggccttttctgcatctattgagataatcatgtggtttttgtctttggctctgtttatatgctggattacatttattgatttgcgtatattgaaccagccttgcatcccagggatgaagcccacttgatcatagtggataagctttttgatgtgctgctggattcggtttgccagtattttattgaggatttttgcatcaatgttcatcaaggatattggtctaaaattctcttttttggttgtgtctctgcctggctttggtatcaggatgatgctggcctcataaaatgagttagggaggattccctctttttctattgattggaatagtttcagaaggaatggtaccagctcctccttgtacctctgatagaattcggctgtgaatccatctggtcctggactcttttgggttggtaaactattgattattgccacaatttcagctcctgttattggtctattcagagattcaacttcttcctggtttagtcttgggagagtgtatgtgtcraggaatttatccatttcttctagattttctagtttatttgcatagaggtgtttgtagtattctctgatggtagtttgtatttctgtgagatcggtggtgatatcccctttatcattttttattgtgtctatttgattcttgtctctttttttctttattagtcttgctagcggtctatcaattttgttgatcctttcaaaaaaccagctcctggattcattaattttttgaagggtttttggtgtctctattaccttcagttctgctctgattttagttatttcttgccttctgctagcttttgaatgtgtttgctcttgcttttctagttcttttaattgtgatgttagggtgtcaattttggatctttcctgctttctcttgtgggcatttagtgctataaatttccctctacacactgctttgaatgtgtcccagagattctggtatgctgtgtctttgttctcattggtttcaaagaacatctttatttctgccttcatttcgttatgtatccagtagtcattcaggagcaggttgttcagtttccatgtagttgagcggttttgagtgagattcttcatcctgagttctagtttgattgcagtgtggtctgagagactgtttgttataatttctgttcttttacatttgctgaggagagctttacttccaactatgtggtcaattttggaataggtgtggtgtggtgctgaaaaaaatgtatattctgttgatttggggtggagagttctgtagatgtctattaggtctgcttggtgcagagctgagttaaattgctgggtatccttgttgactttctgtctcgttgatctgtctaatgttgacagtggggtgttaaagtctcccattattaatgtgtgggagtctaagtctctttgtaggtcactcaggacttgctttatgaatctgggtgctcctgtattgggtgcatatatatttaggatagttagctcttcttgttgaattgatccctttactattatgtaatggccttctttgtctcttttgatctttgttggtttaaagtctgttttatcagagactaggattgcaacccctgcctttttttgttttccatttgcttggtagatcttcctccatccttttattttgagcctatgtgtgtctctgcacatgagatgggtttcctgaatacagcacactgctgggtcttgactctttatccaatttgccagtctgtgtcttttaattggagcatttagtccatttacatttaaagttaatattgttatgtgtgaatttgatcctgtcattatgatgttagctggtgattttgctcgttagttgatgcagtttcttcctagtctcgatggtctttacattttggcatgattttgcagtggctggttccggttgttcctttccatgtttagtgcttccttcaggagctcttttagggcaggcctgctggtgacaaaatctctcagcatttgcttgtctgtaaagtattttatttctccttcacttatgaagcttagtttggctggatatgaaattctgggttgaaaattcttttctttaagaatgttgaatattggcccccactctcttctggcttgtagggtttctgccaagagatctgctgttagtctgatgggcttccctttgagggtaacccgacctttctctctggctgcccttaacattttttcctttttttcaactttggtgaatctgacaattatgtgtcttggagttgctcttctcgaggagtatctttgtggcattctctgtatttcctgaatctgaacgttggcctgccttgctagattggggaagttttcctggataatatcctgcagagtgttttccaacttggttccattctccccatcactttcaggtacaccagtcagacatagatttggtcttttcacatagtcccatatttcttggaggctttgctcatttctttttattcttttttctctaaacttcccttctcgcttcatttcattcatttcatcttccatcactgataccctttcttccagttgatcgcatcggctcctgacgcttctgcattcttcatgtagatctcgagccttggttttcagctccatcagctcctttaagcacttctctgtattggttattctagttatacattcttctaaatttttttcaaagttttcaacttctttgcatttggtttgaatgtcctcccgtagctcagagtaatttgatcgtctgaagccttcttctctcagctcgtcaaagtcattctccatccagctttgttccgttgctggtgaggaactgcattcctttggaggaggagaggcgctctgctttttagagtttccagtttttctgttctgttttttccccatcgttgtggttttatctacttttggtctttgatgatggtgatggtgatgtacagatgggtttttggtgtggatgtcctttctgtttgttagttttccttctaacagagaggaccctcagctgcaggtctgttggaataccctgctgtgtgaggtgtcagtgtgcccctgctggggggtgcctcccagttaggctgctcgggggtcaggggtcagagacccacttgaggaggcagtctgcccgttctcagatctccagctgcgtgctgggagaaccactgctctcttcaaagctgtcagacagggacatttaagtctgcagaggttactgctgtctttttgttygtctgtgccctgcccccagaggtggagcctacagaggcaggcaggcctccttgagctgtggtgggctccacccagttcgagcttcccagctgctttgtttacctaatcaagcctgggcaatggcgggcgcccctcccctagcctcgctgccgccttgcagtttgatctcagactsctgtgctaggcgactccgtgggcttaggagcctctgagccaggtgygggatataatctcgtggtgcgccrttttttaagcccatgggaaaagctcagtattcaggtgggagtgacctgattttccaggtgccgtccgtcacccctttccttgactcagaaagggaactccctgaccccttgcacttcccaagtgaggcaatgcctcgccctgcttcggctcgcgcacggtgcgcgcacccactgacctgcgcccactgtctggcactycctagtgagatgaacccggtacctcagatggaaatgcagaaatcacccgtcttctgcgtagctcacgctgggagctgtagaccggagctgttcctattcctctctatataaattctatagatacatagagtgattatagagagaaactctctctatatataaattctaattcactatctcctaaaagtagcacatttgcctataatcccagcactttggtagaccaaggagaacagattgtttgagctcaggagttcgagatctgcctgggcaacatggcaatatcttatctctgttaaaaatataaaaaaatagctgggcatggtggtatgcacctgtggtcccagctacttgggaggctgaggtgggaggatcacttgagcatggaaggtgaggttgcagtgagctgagattgcaccattgtactctagcctgtgtgacagagcaagaccctgtctcaaattaaaaaaaaaaaaagtagcaaattcaatgttagatgggagaaactggagctgatatggctgcttatagccaaacattwaaagataatttaaaaraaactataagcagcagatgtgttgttttcttttttaatccaaagcataacaataataggaactacattctggaatggctgctctgtgttaggcactttacaaagatcatttcatgtaatcatcacaacaccctttgtgaacaggtataacttattcatagccacataactagragaagrggagtcaggatttaaagtcagattgtttttctttgaaagcctcatttactagtgtcaaggaaaatagcttctgtggccattgctctgctaccaacttcgattttcacaaccctggtgtgaattcatgataacaatacctgctgtgggttagagaaaacattacaaggcagtagttaagagcaccagctttggtgctaggttccctgatgttgtaaaactgagtcctggctctgagatttcctagctgtgaaaacttacgcaagctggtttttaacttctcagtgcctctgtattctctctcaaaaaatgttaataaaatagtatctaccctatagagctgctatgcagattaagtagttactataagtaacaaacttagaacagtatgtggcrctcaataaatactggctattaattttgagttctgaccctgtacctcagggatataggtaaaaagcaggaagaaaatgatagttttaaagaacctaataygctgatattttatagacacagttatttcattcaacctcacaacagcctcattaagtgggttattctcataagagaagtgaaagctgaggcacagagaagcaaaataattgacccagtcacctagctggtaagtggcaaaaccaggaatttatcccacatctgtctgtgctataacagaaatgttgaagtatatttactgttgtgtttttaatagaacacaaaaagattctccctatgttggtaaacatagtgggcacagaatgacacttaagtttactccacacaaatgccaaaaggctggcaaagcccttttttctggctcctgacctgggcaatgcccatgccccactcctgaatgatgctgagggcttgcatccatccagattctctagctgtcctgaagcacctgtttttgtctgttcttctacctaatgctcagcacttgcacactgcctttggctaaatgtcatgcccactctcaaaatcttatttcttgaagagtcctttctggtttcactaggagaaggttggcttttatttgccctagtttctctctttgtctcttgacattttctcatttcttctatctcttctcttttttcttcaggcattgtcaggtttcccaagccccatcctcatggcacataattataccatggtaatgatataccttgttctcgtgtattttcagccttgaatgttgacttttctgtttcytccagtgtgctctgataggaatactcaaagcttcagaattttttaaacatgtctagtaataaatgcttagaaattctctttgagaaggtagaatgtcaccattttcatttgcaaacttcagtagaaaaatactattcaagtaatgttttcaatcagaaaaatatccaaatgttgttcatgtgttaattcttgtttcagtccaagttttagttattcatccttgagtcccaaatcctacgtcacaagagatgattattaaatgaaatgaacaataataaatagaagctattattttgtactacatcataggatgacaccagtataastagttgaggtgtgtagggggaaaatctcagaaagtttaagtatggctgtatctaggggcacctatagasaagctacacaagctatctctttataaacgggccaaaagtagcagagagggttgtgggttgttgtgattgtatggtacattccctggccttggttactggttgttagttatgcccagatcaatgtctccatcctgttggggaactgatcttaaccactactattttaaaaacttatttcaacatttatattatcatttaaagatcttacttgattctttactaccactgttattatcacagtgatagtagaagaatcttaattatttccatgtaatattttatgattacaaaatgttattttgtaataacattacaaatatttgcaatamtgctaccattttatcttcaaactctactgaggtagggaggtcactttacagatgaaaaatttaaagcacagaagcagttacatgatgtcctttttatttcagtcctaaaaagtagaggagtaatttcactataaactacttgaaggcaggaatcatgtcttatgcacatttcatattttacaatgcccagttctgtgcccagcacctacagttgactgagtaaaggaatgaatgatttttaacttagggtttgcctaaattactgattttgacactacaatctgctttatgcctccattctcaccttgtccccttctccattctcacccttctccatcagctgctggcccaggacagaacacattctgtggaatggcaatggctcagcgtattgctcaaaaatcctctatctttagagtttcatttctattatctctaatttttgcttccatttacagccaggatctaaaactattttatatgacactctattattcatcacacaatcctcatttcactgagaacattattccagtttgatggttcttcttcaaccaactaatattccagtacatgacctgattattgacccaacttcagtaacttcattctcagacttggcacatagaccttaagttattcatttttggtgaagcgtattctgattgarttcatgacatttagagtaatccctcacttatgctagccgtattgttatatggaactgggctatcaactcctttacatcrtaacaaacattaccgaacatattttcgtaagtgtattgacaagacgaatgttttaaacactrctacatgcttagcactgtgttagatgctaggaataaatgagtaagatagtgtcttccaccatagacccttagtgactcattgtgactctaatactcagacaagtgactcagtacaaaagtstataataggaaacrgagacctggtttgctttgtgttttgtttctcagaagcacatataagtatcttgatgttgtcctttacaagtgttccacaaaattaatgtgaatcagaagactaagcctggcctttcattggatacactttctgacactgagttaattatagaaaaaaaatacagatttctttttcatgattcartggagcctgaccartcagccaaaattctgtcattcttgggctagattaagaaatagatgtgtcaaaacatctgatacactacaaacatatttctgttgaattttgcattttgaatcttayctattttctttcagtatataaagtgttcattcattactttattaatgaaacatatcaattgaacaacaattaaataataggtattttgcaaggtgatgtgagagaatagttaaaggttcttgttctcaagaaacttatcgtccagaagaagaactgaggcttgtctttgaaatccctatggtaaaactgtatcagttgactcatttaagaccacttttaacccaaaaaggaagccctgacattttgcaactgcaagttaccttagagataaaccactccaaatcttccatattatggataaagaagctgagagtcagttgaagaattaataccaggccccagagaataaaaggaagaggtgggtctagaatccatttctcagattcatagttggtgttcttagccaccatgccacactgcccctaataatggactcaaccaaaagtacagtgaagggcaatgcccgggcttgcaggctttcggtaatatgttcatgagcatgtgtgaggggcagtgcaaagagggcagccttctctggaggagacctgctctgtctgacatgattaaagattacagaggaaatttctgactttcccctttgaatatttagcattcaaagaatattttttgtcttttgccaaataaaggctgaacaaatggtagttgaacagaattaagtatttcttcttatttaactagtgcacttttactaaaatgaaactctcaagtgagagattatgcaaattagcttctgcactgatccaatagcattggggtgaaaagagcaagagctttagagccagacaccctcaggctggtaccctgctcttatacattttatctgtgagatttagataagtcactttgccgctttgaatcttcatttcttcctctattaaatggaaataatacctatctctcctgctgggttgttatactttttagcaacaatgataataatgcatctctgtgccaatctctaagctagatgttttctatacattatttctctgtaactatacagtataagtaaaacatatagtagaatgcttgtcgctgaaagatatttgtatgcttcctgttactacttatctaatcttcccttgaagaactatcattattaatacattttgtttgaaaatcagaatcttatctactaaggcctatagcagacttatatatcccacaaatacaaccaatccattaataatattgctggggaatggggatggcctatgcaggaatgactagtgctaagtatgaaccagtttatgattttgctgatgagctgtgggcattcctccttttcttgtgaggatactgasaatgtcttaattcataattgcatccccagcatcaagcactatgcctgggacatgatcrgcattcagtaaatgtacacagacctgaggtgaaargtgtctttttggttattggatccccatccttgaattggaaaagtctagagtctgactgtaatattccagtaactttggcctggacagtcttggaaccaaagcactattaccaggggcagtaattcctgtggtcaccatggcaaagattccaaagtcggccggggaggtggctcatgcctataatcccagcactttgggaggccaaggtgggcagatcatctgaggtcgggagtttgagaccagcctggccaacatggagaaaccccgcctctactaaaaatacaaaattagccgggtgtgatggcgcttgcctgtaatcccagctacttgggaggctgaggcaggagaatcgcttgaatctgtgaggcggaggttgcagtgagctgagattgagccattgcactccagcctgcgcaaccagagtgaaactccatctcaaaaaaaaaaaaaaaaaaaaaaaaaaagagtccaaactcagaattctaaattcaagaacatcaaaatgaaaagtagaaggaaatatgggaacctagtatgtaattctccctaaactcagtttcacttactgttctcttaggatttttatgtggttccatgctrggaccaataaaatggaatgtttgaaaagaaacagtaggtatttcctcaaatctcctttagctctgattaatgcactcttactctttacattgaggcacactccagattcaatgttatatcgtttcaaaacttccacataggatctttttaatttttatttaaatttgggacaagtcttgctggggaaaaacaaaaagttcctctstagaatcatatctattttcacctgtggtaaaccaagtcaaaattatttgataaatgaacaccataattcaagtgtatgacagctcttatgtcttcttgcaagaatgtatttttttttgagctgaaataatgttatttcctcttgacatgtattttagggtaattctttaacataaaacagagcatcttgcttatagaattattactaagctctttgattaacagtgtaattctgtgttctgtttcttgaatctgagmctttccagagaagaataattmtttttaaggcagcagttcccaactggactgtctcaatacactggtttatgtcaataattttattccaggtgattttaaaaagaaaatgacaagcttaagcaaaatgggagtaatatgtctccatggaatggacagaagggcaggattagagttgtgtgtcaccaacacatattgggcataggagtgccatcaagactctctcagccttcgaactcaccctcttcatttggaggtttgagatctgtaactgtggacaagtttgttcatgaattcgcaaacttgtctctcagagtgcctaattagtacatgttgaactttctgctacaagagaaagattgccaaaatgaaagaaggatgagagagaagaatgtagggaggaatggagaaaggaagggaggaatgagggagggaaaggggaggggaggggaggggaagggaggggagaggaggggagagaagggtggaggaagtaaggggaaggggagaatgggggaggggggaagggaggaagcctggcggggcaggggagggagggagggccagtttttgcttctcctggcctgtattaagtgctctcccacagaaaccagggtgcaggtttatgtaagaacacagcaattcctgtgagaatttttatgttgaaagttggagataggagtgggtagtggtactaagtagacaaatatatcacccaatgtaatgtgttactattaatgaagtaagtaagttttgcaaattactttctttataaattgggtcagatttaaaataactcttttatggacagccctttcaattgcttgcattccagtatatctttccttggtaggagagaaaaggaaacttatagacatcatggcagaactttattgaactagcccctaatttcacgtgggcagaacccatatctatctttgttagccctagtgcctagcagagagtagtgctcaataaatgttttttttttcctaaaagttgtggcatctatkgttttagggatkgcaaattatgatttttatggtaactgtcttttaaattttaaccatgggcatatattttaataaggaaggaaccaaagtagaggaaaaatgggaagagtccaattccatttacactgtacatgagtacaatgatgttgcaaatatttctattagtaatggcacaaaaaagatcaatgaataaagttgtatgatgatacaaatgaaatttgtaggaatgataccattaaaattaacaacaaacattggaagttctatatattgtgactttaaaagtgtataagttgtagctgtttctccctcagtgtcacatactgaccaaatttattatttattatttatttatttatttatttattttgagatagagtctcgctctgtcacccaggctggagtgcagtggcgagatctcggctcactgcaccctccacctcccaggttcaagccattctcctgcctcagcctcccgagtagctgggaccataggcacatgccaccatgcctggctcattttttgtatttttagtggagacggggtttcaccttgttagccaggatggtctcgatctcctgacctcatgatccgcctgcctcagcctcccaaagtgctgggattacaggtgtgagccaccacacctggcccaaatttacttatttattttatttattttttttcaaattcatttttttaagcattttattgtttcttgtaaaatggccagtttttttcaatcttaaaatgtctactttcactttagacatgcttattaaagagctttaaggcataataccacaagtaaaataaacgtctataaaatctgcacataatttgcattaattttgtctttagtttttggtcaaaatctagatacagtcacaggaatgtggcgatatccattatgctggtttggccagaaacaaaattgccatagctacgtagtctaaggcatggaccacgtgagaaagaggtagttttttaaacatcaaatagcaaataagaacagctgagaaaatagagcataatatgatataattgcatcagcttctggagtggagttattttcatacttgaaattaatgtgtagaataaatgcaacattttatttgcctagatatttactctctcaaagtccaaatatcttacattaagaattttgcttaccacaacacattgcttcagttgactgattgtgaagaaagtgtttattcctggagttttgtggaagaggttagtggaagcctcttccctaccagggagctgttattgttgaggcaaggaaagaagcccagagccacatatatcagagaaaaatccaaacacatgtaaagcaacaaggaggaaaacacagtggggaagcaaatattctatactaggcaggycttgaatgctcaattctatcactcactgtctgtgtggtctgagaacattctttgtatgacttgaatccttaagacttgttttatgacccagaaatataataatctttgttggtaaatgtttcatacgcacttgaaaagaatatattgttgatgggtagtctataaatgctaattaagtcaagttgctaatgttcacatttttgtttcatgtattttgaagctgttattacatgaataaagatttaggctttttatatcctctggataaatttggggcttcatcattgctcataatattctttgctctgaaatctgctttttttatatattaatgcagtcattccaactttcttttgactagtgtcaatatggtatatattttttccatctctttaattttaacctagttgtacctttgaatttaaagtgtatttcttataaacactatatagttggatctttcttttttatccggtctaacaaacagttgctgccttttaattgaagtgccttgaactttttacagttgacatgattgttggtgtcattaggtttaagtctaatcatcttggtactgttctctattctctttttttctctttgcatgtctgtttggaggtttactggataattgttataactccattttatctcatttgttgatttattagctataactctccagatgttgttgttatattagtggttgctttaggrtttgtagtgtacatgtttaacttatcccattctagcattactatcaatattataatacttcatgtaccgcattagaaccttacaaagtatagttttctttcttctggtttttgtggtattgtcacatattttatatgatacagtgtgtgtgtgtgtgtatacatatatatatgtatacacacacacacacaaaataaaccccatgacacattgttagtattttgggttaagtagatgtattatatatatttatttatatatttatatataatataaatacaaaatattaaatatatattatatattataaatatatataattatacatatataaacttccatttatatatttatattatatatatttataatataattatatatttataattatataatatatatttaatattttgtatttatatataaaatataaatatataaaatataatatatttaatatttttaatttaataattatatatttataatatcctatttataggataatttaataattatatatttataatatcctatttattataggatataaataggatatatttataatattatatattataaatatatcctattataaataacatatatatgttataatatatatcctattataaataggatatatatatatatatatatatatatatatatatatatattctattaattctgtccctctagggaaccctgactaatacatatatatataatatatcctattatatatatatataatatatcctattttatatatatatatcctattagttcctatataaactattatatatctatcctattagaactaataagatatatatctcctattagaactaataagatacatatatctcctattagaactaataagatatatatatctcctattagaactaataagatatatrtatattctattgtttattaagtattaacttagactatcacaaggtcccacaatagggtgtctgcaagctgaggagcaaggagagccagtccaagtcccaaaactgaagaacttggagtccgatgttcgagggcaggaagcatccagcatgggagaaagatgtaggctgggaggctaggccagtctgtccttttcacgtttttctgcctgctttatattcgctggcagctgattagattgtgcctaccagattaagggtggatctgcctkccccagcccactgactcaaatgttaatctcctttggcagcaccttcaaagacatacccagtatcaatactttgtatccttcaatccaatcaagttgacactcagtattaaccatcacagtggacaattgttttaaagaagtttaaataacaaggaaaaggcttaggtattcatccacatagttaccattcccagggtacttcctttatatatatccagacttccattaggtgtcatttcacttctgcctggagtacttccttcactacttctttaagtgcacatctgctactaaggaattctttcagcattttatgtttgaaaaaagtctttattttgcctttatttttgaaagatattttatctggatatagaattttaagttgacccttacagtgcaggtaactttaaagatgttgccttcactgttttcttacccatgtkgtttctgatgagaagcctcttgtcatccttgtcttccttattctctttgcatgaagcatgtttctttttcctggcataaataaattttttctttttattagtgctactaagctgtttgattatgatgtatcttggtgtgtttctctttatgtttcttgtgcttctgtggtattaagcttcttggattaaaatattcatagttttcaataaaatttggaaaattattggtcatgattccttcaaatatttttcctttccttctcactcttcctacactttggaaactccaattagaggtctattagtctacttgagggtgtctcacagttggttgatactcttgtcattctttagaattattttttcacggttagtwtggttagttggttagtaactaacttggttagtttccattgctatgtattttatgttcattaatattttaggcattgtttaatttgcctttaattctattcagcatatttttcattttcaacattgtagtttttatgcctacaagtttaatttggattttttttatatgtttcatgtccctatttaacttgttgaccatctgcaatacaattataaaattgttttaatgttcttttctgccacttctaacatttgtgtcagttatgggttcgttttgattggttatttttttctcccattgtcagtcatattgttctacttctttttatgcctggtaatatttgactaaatgccagacatggtgaattttactttattggggccagatatttttgcatttctgtaaatattgaaatgtatcatggaactgatcttttcaagttttgctgatctcttcaagttttgcttttaaatttttttagatgggagggcagcatttaggggtaattatgttttaytactgaagcaagatttttctgagcatactacttaatgccccatgaattgtgaagttttctagtttagctggtgagaaccagcactgatctcagccctttacaaatgccaagtattgatcctactcatccttcaaaatggttctttctctggcctcttgtagtttcttcatgcacacagatgccaatcagtactctgctaaatactcaagagtggttctcagcatatttccagaattttctttctgtgcagctctcttctgatactcttttctgcaaactctagccatgttgatctcttcagattctcagttccatgtcttcaactaagagagtctgccaggcttctcctgggttctttgtccctgcttgatggcctcgagactctgtcaaggcagaaagctggggcagttacctcatttgtttcccatctactaaagattcttgtccttcattgtctgatgtctggtgtctgggaaatcattattccctatagtttgtctgattttatttacttttggttgtttgaagcaggaggttaaagctgatttctctcattccatcttgcatagaaattgaagttccttcttacatctttaaagatgaaagctgctcactacctatctcatatacccttgcagatgccatgtctctaggttatcagatataatttagattcagctaatcaaacttacttaggcaagtcttagaatatggaaatgagttagaaattgtacttccttttcatctgctacttttttctggcatacacagtggttgtaagatgtgttgggtttttctgagctgtgctatcagaatctccattctttagtcaataatttcacaagtgccaagtggttgtgcctagggcatcttctktttagctgtgctgacataggaactgtatcatgtccctggatccaatcgttttagacaacctcctgatccctgtagcttagctaaaaagtacattcttggaaacaacagttctgatgggaggttcttgattactcatcttctagttatggcagaggtagcagctcatcctgcagctttggaatcacaagagtttggttcagctcaggatacagtgaacctataatactttaattgttctgcttgttcaggtcagaatgacaatgtatagaggccgtcagaaaacaggcacttacaaaggtgacttgagaaatgatcagatcacagcacataaaaattttaaaaggctttttaaatcagaaaatgactatattgtatatccttatacatttatttccaaccttaaaaaatactgtcttatatgcaatatttgtattyttgtagttttatttatcaaatatacttgggataagtttagtccctacatatatatcttttatactcccctgtattaaccataaaggaaatttaaattgattgaagtatgtctacatcatctttaaaatcagtacatgctgatataacagctatttctgcaaaagacagacactgtcatttgagcttcacttttggcttcaagggaccctccacctttctccaactccagtttcataactttgtgcctgcaaaagaatgtggtgaggggagggcttctctaggattaattacagagtttagaataagaaaattaacatgtctaacatgcttattatgtgccaggctctgaaaaatgcttttatatattaccccatttaatcattacaacaaccacatgagaaggttttaactattttacatgtgaaaaacatgagactcaaaagttcaccaactcaatacagaagaaagctagaattcaatccaaatctatccatatcaaaagcttgctctttccaatgtgttatactgcctcgaagcactgttgtaaattgtgcttctccaggactgaaccacatgtagttatcctgtattgggggacaaacttatctgttgttcattcaaatgcacccagtgatacataataccagggctcagtttgcttagtataaataaaagtttcctacattttagcaaaaggtgatgctaaaatgaaaataaataatraaatgcccaatttttgacaattatctactcttctcaataaaatgttacctttattaggttagattttccttaggcttccaaagtttatattcctagaaatgaaggtaatgatttttgtgtttttctgggacgggcagtgtattgttagtctgttctataaaagaataaggttgcattattcatcagaatcattttagtagtaaatagactttgatatgagaaagaagagagttctgaacagtctctgaattgtatttatgccaaatatgtaattatattactctgcaaatgaactcagtactaagacacttatagccacatctcttatattagtgataatttaggcatttgtttgcctaactgatgacatagagatgactaagaccgaaatctgacttcagttggagactataatcaccatttggaattgctctttcgtaatcattttaataggataaatcacatgttacataacttcataatttatttagtcataaattgattctaatcatgtgaatcgggcatattttttactcctaaagtaaataaaccaaaagatttattaattaggttagaccaacatatcaattagttggggaaaaaaggagtaaaaaagcatattgttttcaaatcataaaaagctactaaaaaactaaatggcacatgaaacatttaatctggcagaataattccaattaaccagaaagccttaatgatgctgtaaagtgatggggcaggggtagtcttttgaaattagaagagtcaggttcaagtccttagtgtcactatcattatttagatggttatcaggcagaagagggagtggacttattctctgtaacgaattaaggagttyattcagagtaagaaaggactcttgtataaccaagagacccatccaacaaagagtgagttgcctcactaaggagtgagctgcctctccacctcagcagatgctccagcagaagctgcatagctggccattatgcatggtaaaaggcattccttcagtggttgagtgtgagactagagttttccatagaccttctgattttggatggscttaaatcctcactgcgcatgtagctttctgggattctgtactgagtattcaattgccttgaatagggggagataggtctrctacctgtctgtatcatcttacttttttcttagaagctcctaggttttatcactgacctcgaaaggtaagatatttggtcttgttttctagctttgtgattttctgtcaatttccaaccttccttttctcaaaatttaagagttacacagctggtcagattatgtctcttatcactgactcatactcctaatcttcccacctgtatcttctcacattcccgtttctatttgccataccccacaaagtccttaatacttgtctgtaatagatgacttcaagcccaaagggtgtatgcttttcaaatataaaacaaaaatataaaataatgaattatagtaagttggagtgaaggttctaagattctttattttaaatatttttaacattaaaaawtgtttactatataaaattaggaggatacagaaaaatrtaaagccaaagataacccactcataattccaccactgcaaaggaaacattattcttttagtatatatgctttgtatctttatatataatatrtaaaacaaaattagaatcacaccatacagagagttctgtcttcttttacttagcattatattgtgatcatttctccatattattatatatactttagaaatatgattttttaaatgagtgcttgatatcaataaaagataaacatgaaatatgaatatattaagatcaacacatcagacaatgatgttgacattagccattaaaattcacctttgatcccataccaatctctggcatctttctgactataatcagctttccatttagaatttcctacagagagaatatgcaatgaacagtttcagtccgctcatcagtartatttctcactatatataacaaactatcatcgtgcttmttaatgcacatgcctctcttctgctgaataacagtacttttttttttttttttgagacggagtctcgctcgaataacagtacttttatytgcatagtcattatttaatttaatccttacaaattccttgtgagtaagcagagtgggtgatgcaatctctcttttaatgaggaaaaagaggctcagaaagtcatgtaaagtgttcaaggtcatcttaacagcgatggacaacgtttgctagaaaaaaaagatttgaaagttcataagtggaggaggtagaattcaggccagatttttttttttaatttttaacttccagtgttcttaatatattattctttggcctcttgcatggtatcttgatttaataaacatttgttaaattgcttgagttaaagtacttgaataaacaaaacaaatgtatttcaaaaagaaaaaaacccatatttatttaaatatagtaaatagccaggtttggtggctcacgcctataagcccagcactttgggaggccaaggtgggtggatcacctgaagtcaggagttcaagaccaccctgaccaacatggtgaaaccctgtctctactaaaaatacaaaattagccgggcgtggtggtgcatgcctgtaatcccggctacttgggaggctgagacagaagaattgcttgaacccaggagttggaagttgtagtgagctgagattgggccactgcactccagcctgggcaacaagagcaaaactccatttcaataaataaataaataactatagtaactcatctgtcatttaacctgagcatagatccctatacccttttcctcctttactatttacctgaagttcttcagattttattcttttcaagcttcytggactcctgtatcatctgtcaccactgaccattatcacattatgaatcttcctcctcccctgcattctgtgacattttcctctggttgtcttcatgtatctgcccactctcatccatagttctttggatgactcttccctcttcatctaaaatgttgttattctcttgggttttacattcagcttttttccttactttaattttacttttatttaccttcctttacttttattctgaagtgcttcagaataaaatgataaaggaaattgatctaaactattaagaaaagtgttttgatgagaatatgtgttttcctgagtattctaaaaatagccataaccagtaatagtagtaayagtaatgatattccttcacatttggatagtcatttgcagtttacagggtgcttacattatttctttaaattcatcacatggatcctgggaactaagaagaattttcatctctattctgtacgttaataatattctgtacgttaatacacatcacaggtctcagagttttacctgtgaactttggttgcagagttttgatgccccccagtagactcttgtaatcggcatatgagtttgagggggtacatgtttaaggtgctagactgatgggacccataactagtgtgcttgatagtgatagatatttagaataatagtaacaactggatatgaagtagataccatgtcccagacactgctaagtgcatgaagtgaccagccataggtttaacttcttttttacagacaaggcagataagcttagctcattctctcttttcatgggggagtgtgatggaaagtctgactctcattcaacatgtcctcatgaagctagtcccatggagctgtcctgtttaaacggatgtcccagttctgctgcagcttgaagaatttttcagatgggatgaatttttctgactggcttgctgagtctctccacatggcccctgccatggcagagatcttcctaataccctgctttgttaaccagccccctgtctaggcagtgttttcatctttgttgtgtgacatgtcctctattaactcaaaatccccwttctctcctcttcactgcctgacttacaaggataagagaaactatccctgggtttgactctctctgcctcctacattggcatcatatcctggaacaatcattacataacagtcctgggtttgcatcccagatcagcttcttagccagagscttttgtataacctaaagtctcttcaccactctgatctgcaatttcctcatctgtaaaatgaggattaaaatgttgaagagaaaaaaggatataatatatgtaaaggacttgacatatagcaaaaaattcaataagatggctgctattattaagatttttattctgatacttratctgtactgtttccatttttctgtgccattctgcctgtcatatgcctcctgacatgagcttactgacataattgtcagaaagaaatagcactgtgatttataatggccttcagagactgtcttaagaatttagatgtatttcattgttaaacgaatcaaattcagaattaaaaaaaacagagcataaagctttcaatagcaacctacttttctgtacttaaaacagattttttaaatgaatttattaatgatatttcaggaatactaccacccaaagaaggaaaaatctgtacttcagatctctgaatgactctgatggtatacctgaaactgggatgttgtgaaaaccaacattattcctttgagacagtgataagtaatttaactctttctgatttgatttctcattaataaatcgaagaaacaggaaagtaaatgattatggaagtagggcttcggcttaaacatcttaagtcctctgatagcgcagcactgtggataggtcaacagacaagaaataataatgaatcacagatgtgaatgcgattttacaaagccttttccttccatgatcttttctgaactcaygacaacctgggaggggatgagagatagaattatctattggacatttttcaagcttcttggactcctgtatcatctgtcaccactgaccattatcacattatgaatcttcctcctcccctgcattctgtgacattttcctctggttgtcttcatgtgtctgcccactctcatccatagttctttggatgactcttccctcttcctctaaaatgttgttattctcttgggttttaccttcagcttttttccttactttaatctctaagggcaatctcagttcactgaatgatttccattagctttaatttcgacctaatttggtagttgcagcccaaatctctctcctgagctcctgatatccatcccactgttactggacttcttaatttgtatgcccctaggtacctcatgctcaccctttgcaaatttctcccagccaagtttctatatcactttgtctggagggatgacaacactttccatccattaccttagcccaaatcctcaacatcatccctgatacttccctttctcttcctatcctcattcaataattcacttaactctgttgactctgcctccttaaaagctctcaaatactcatccccatggctactaccttagctcrgacactcatcattacttgcgtcctcytgcaacagcatcctaatagtttttcttgcttttgttctctgccacctgccaagccaatcatactgcagtcagaatgatccttgaaaatgcttacctgtctgtgtccttacagacaccttatttacatatataagatcatacgccttatttacatatatatgcatatggagagaaagagtccctcatttcctgtagcaggatacacaaaataytctctaatctagyttttactgcttctcttcaattcttcagtttttgacattctcaamtctattgctttgtatgatccttatctagccatatctagctggactgaattccttgcagtttctacatttgtcaaggtggtctcaggtctctataccttgtaatgcaactcactctgcatgcagctgccatcttcactatacttatgacagcctacccagacagactgtgctccaggtcctgaaggaggtttcccctgaactctttcttcttgggattaagtcctctgttgcaatctacgcctttagcactagttgctgaattacaattatcaaattaattttctttcctactagactctgccttacttaccttttttatgtccagcaccccaccacctaaaacagtaaatacttagcacatataaaatacttaatgttctttggataaaataacattttatagttgggaaaacgaagatagagaaaggccaacatcttcccatgagtacatggtagaggcaaaaccaggttcccaatcttccaattctttctccaacttttttattctattgctatttctgtaaaacagtagccttaaacatagactaaaaaggggcttttataaacagtttagttttaagtccatgaagcctttgcaaagaaaacatgacttggctaagtcaagaaaatattatagcttgggatctgcttagatatgactcattcttgtgccacccttctgaggttgagaatgctgagctttgtcatccctgattactccaggctttcaacgagtcacccgaaacttaagaattagatggctccttcctgtttatgtctctgtttccatttctaggaggtgatgattttcaactggattaaccgttcctgtgcaaaaatcattaccccatgagacggagtcaagatgggataaatagctcatcccaagtattatcacagcactaaaataaatttgtgtactttctagtgatcataatagcacttactagttgtttaggcactgttttcagaaatttgcatacagyattttatttactctyatataagctttatcataaaataaattgcaaacacctactgtgagatgttctgctactgtgaggcatttaacagattgtttttgaatgaaagaatgtttctagcattgtgaggatacacacacacacacacacacacacacacacacacacacacacaccatgccctctgcccttagcttttatctaattgggcaaattggtctactatataaacaacaattagagagaaagagaattatttctttaacacttttgtgctagacactatgttaaatactatatataaatgtgtggtaggtgtatttaaatctttacaggaactctatgaggttttctaggtggtcaagtgtaggcagagccagaatttaartctagcctacttggctcttccaattccatcacatgatatttagaccaaatgagatcacaaaggaatgcagagggcaggggaaaaggaatgaaattgctggaaaagacttagtcggtccagtgtgaaaatgtgattgggattagatgggcagaattcgggaattcagtgggagcacaggcttcaggacaggcacccacagatagaacataaagttgctgrcctattaggaaaatggatctcattcctctatgtccagtatctatcatcatcactgggcctgtggtttttccaccagctgctcccgtgtaataactgagcagttatccttcaacttttatacaatgactaaaaggtgaattttaagccacacatttcttgtgtacccttcttctgggaaattatatttctaggaaagtcattttgtactagaaatcaaaaatatcttagtgggtgcaacccactgccctgaaaatgccattatttattaatccaaccagtaggacttcatgaaacagaagggatgatgttgctattgcagaaactctctcattggcaagtaggggcctgcaatatggcatacagaaaacaggtacactcttctggactgggaaccagactacctaaattcagtcctggctttgtactaagtacagttattgaaatattcttgaataagtgtctttaccttgcagaaccattcaatagttctcctacctgtgaaatgtccaagttggagtaactcagagtatcctaagatgtcctcttcaaaatcatttgttacagtgtttgtgaaacaactgcatatcatatacccttcttgtagattgacagtgcattgaaatctctgatggccctgtagaaaacaaaccaattcaacagtgattaatccaacatttaaataattatttgacaagacatactctgggaaaaatttcactgtgtactctgcactgaatagaaatttctggcagttctgagaaaattcagtttgctttcaaatatgatttgtargttgcctctaccatgttctcaattcaagttactgacrttttaaaactgcacaagggcttaataaagatactgttatattatcctggctgcctttttctctttccccagtgttctggtgcaaattaaagtgttttacataactctaaaggtagtgaagtaggaagaagagaagatatattgtttttgctttgtttgctgagtgaacagtttgagatgtgagttaaggatgcagatatccacccttctgggagcttcagattgcagttggaactgattctccagcacaaykgtcatattataatctcagtactcagtaacagagtactgaggtggcctttggatttgtagtcttaaagtcaaattayagaaatacaattatcttatcatgagggattgtaccaggaactatgctagtgaatggcaacatgatagtcattaagataggcgcctgccctcaaggagatcatagtccagtgagggaaacagataaagaactgcatgattgattataatacagttatgtaaaytgtttggattaggtaatgcataaagtgcaatggcaacttggaatgaagttctttgactagaagatatttgcaaatccccttccttgatccaatcagtgcagaaaaaaaaaagaaattcttcttatgtttgtttgtggctgattaactttttgtcttgaccagcataatgatcatgatgatgacgaatggggaggcattataagacattatgagagatggaatggttttatttaatccttgttgcaagattatcaatcttctctaaacaagtagataacccacyaataataaatgcaaacaatcattcactcatrtaactttcttaaaagaattttatcagtggatggagggttagatccctcagtaaaccccaaaaacatagatgccagaattttttcctttgcatccccatatgttacctgccaaagcagcagaatttcccctaatgaattttgggttattatgaacagctaaacagaaaatgaaacttagatcctggagtgaaatatccaatttacaggtagcaaccttgtgaagcaatgaggggatgagtgtcttaagcaaggccacgagctagtcagggacagaggcaagactgagatctagggctcctgaccccccccattccagtgcactgtatcgtgctcctgtctatggtatcttaggacacttgtgaatattttcaattttcatctaatgaatttaacatttttctaaaataagtaattgggtggaagttaaaaaagaatccctaactaataccttaccttgtcacaagaggatattcatatgtttcaaatttattatatccaacataaacattcccaccaatgattttatcatagaaaacaaaaaaaaaaaacacatgaaaaattaggtttatattactgatttccaataatatgttggaacaggcccatggtgagcaattgaaaamttctggccaacagtctaattatctgctatttgataaaaaataaatcaaaacaatggataatatcactgtcagttttctctcagacagaagtatttcaagaacccaaatgctacgaagacagtgaagtgcttgagactaataygaaagagacattgaaataagatgaacataatttaaacagcaaccctataccatgccaaacatttggtaaataaatacagtttcatttagtcctcacaatgactctgtaagataagctctcatttttaattagatgaatcttggctaacacctatctaggctttaatttcctcatctataaaataaggatgtttttcaccctactcccttgtaggattcttgaattctctcttgagaactcgagataatgcctgtgaagtacttagcagaggacccagcacctagtagttgctatataaaagtagcttttaacaygattgtactcttcagtcccatcattaagttttacagaaagttgtgttttcgaatttacttctgcaacttttagaatatagagagcaggtaaggtgaagcatgagcttccaaaaccctcacctgcagctaygttaacacttccartgacttttctttattaagaaaccatgtcagaaccatcccaaagtcctgtggattttatttacaagacccttcactacttcagtaaggggatgatcaaagaacgtttaatttagaagtttcaaagttaaagccagtagtaaagaattagggaggctgggcacagtggctcatgcctgtaatcccagcactttgggaggcygaggcgggcggatcatgaggtcaggagatcgcgaccatcctggctaacatggtgaarccctgtctctactaaaaaaatacaaaaaaattagctgggygtggtggcaggcacctgtagtcccagctactygggaggctgaggcaggagaatggcatgaacccaggaggtggagcttgcagtgagcaaagatygagccactgcactccagcctgggcaactgagcgagactctgtctcaaaaaaaaaaaaaaaaaaaagaattagggaaacaaaaacagaaacattactgccaactccccatgtgcagagaacaacctactagggaaatcttaaagaccagatgcagattggtaaggcgctcaagaaatgtaaagaagtggagtttgccatccagatttgttccatattagtttatccttgatttctaattagaataaaaagtaacatgaaagaacaacaaaattttrtagaaaaaacctacttcaacctcactaagttatcatattttccttagctatgtattttttcaatatactgaaaacacagattgtactgatatgtacctatttgcttagaaacaatataaattctattggcataataataaaaataaactaataaaatccaaccattttccctgttctttattcttctcattattcaaataaaagccttaataatgattatcaattatagccttgtatttctatctcagagttctttccagagtctcagtgaactragtgcctgtactaggatcatcaccatctaacaactccccagggtggtcaggggtaaatggtacccccccacccagggcatcasagggtcagttatgacatttatgcgaatcaaaatgttgcaaggggtgagtctcagtgcaccacagatgctcccttagtgtcatgttcaattaatgtaaagcttgtgttgattctaagagttaaagcgtcactttaactatataagagtgtatataaagagtcactttaagtcttacaatcacagttttattatctacagaataggaatactaaggccaggcacggtggctcacgcatgtaatcccagcactttgggaggctgaggcaggcggatcacgaggtcaagagatcgacaccaacctggccaacatggtgaaaccctgtctctactaaaaatacaaaaattagctgggcgtggtggtgggcacctgtaatcccagctactcgggaggctgaagcaggagaattgcttgaacccgggaagtgaaggttgcagtaagccaagattacaccactgcactccagcctggtgacagagcaagactccatctcaaaaaaaaaaaaaaaaraaaagaaagaaatactaagtcaaactttgcaggattattgtttatgttagaaaaatattatgttcctactgccctacctggtacttattagtaattcagtaaatgatagctatttatattattatctttgtaatctaccttctcttcatcatcttctttaggtctcagtgtaaatcaaagggaataacattgcttattccaaaggattaccacaaggactaaataacacaggtgaaggtgctttgtcaacaactctcagcactgtatgtgattcttaaaaagaataattaacaaacagactggagcctctggaaaactctttccactaagctacagtacaaataatagagtctatgatctttaaggaaaaccaaaattactcttcayttgcagaacttacagagactctttacttgcagtctccttacaaatgactgtcagtgccaggatctgaaggtccatgggatgcagcatgcacaggtagagcacaagagacagggagcaggcactaaatagctcaccactaacccctctgagtcctggatgggtgggttttgtcctccaaatagcctctgctagaacaaaaaaggggtattcatrtatggtgtcagatgcagagtgatatggtttggctctatgtccccacccaaatctcatgttgaattggaacccccaatgttggaggtggggcccggtaggaggtgactggatcatgggggcgatttcttgtgaatggtttagcacaatgctcttggtgctgttctcatagagttatcacaagatctggttatttaaaagtgtgtggcaccttccccaacgccttgctcctgctctggccttgtaagatgagcctgcttcccattctccttctgccatggttgttaagtttcctgaggtttccctagaagctgagcagatgccagcatcatgctttctctactgcctgtggagctgtgagccaattaattctcttttcttaataaattacccagtctcagatatttccttatagcaatgtgagaatggactaatacacagggggaaaaatgatttamggaggacttattcttaagtatagttacaatcgaggaccctgttttattggtgggaaatagttttttccccctcttgactttaccttccctgtggaagaaaatccctgatcattctacgtcagcaatggaatgaattaacagattggaaagttaaggtgcagaaattggacatatataacctaatcctctgtcttgggagtagcctggatcactccagtttttagtggctccttaatcagccctttatttcttattttgagaaacagacattttagactgaatagaatttccaccaccatccccaacccactcctccaacacaagctacattaacatccacctttaatctagctttgactctcaactctccatgttcttgtacttttcctccaaatgtaggcactcttcaaagttcaggtcagctgcggtggctcacacctataatcccagcactttgggaggctgaggtgggtggatcacctgaggttgggagtttgagaccagcctggccaacatggtgaaaccccatctctactaaaaatacaaaaattagctgggcatggtggtgcacagctgtaatcccagctattccagaggctgaggcaagagaattacttgaacccagaaggcagaggttgcagtgagccaagatcctgccactgctctccagcctgggcaacagtgagactccgtctcaagaagaaaaaaaaaaaaagcaaagttcagcccccatccttcccctctctttcattatactctcttgaaaatttcttctaatttcaccatgtatcagtaatgattaagtttgactacatataaaaagcccagaaataccaaaatagcagtgacttacacaagaagttactttctttcttatatataagaagcatcagggtaggctcttcagggtgagtatggcagctctacctacagatttaccaaggacctccaggttccttccagtacccttatctgccattcttagggtttggtctttgtctttagcatccaatttggctgctggagtgccaggcatcatgtcctttgctaaaagcaaacagcttggaagataaatatgacctcttcctttgaagaagactttctggaagtaccatatacccctactgcttacatttgatgtgtcagactataggctcatggatatagctagatgcaaagaaatatagtattttaggtacatggcaaygtacctggttaaaacttggaattctgttaatttgagagagaaggataaatggccaaacatggcttccgtgatcaactgtggaccaataacttaaatctgtctctagccacaacctgatcctaagtgtaaattctcatttccagccacctgcttgatttctccactaacaccatatccaaaacaaagtaccttcattgaatctcatgcataaaggaataaaaagctcctatttacctgaaggctgttgatacacacaacaggaacaacaagattatgcgagtaattctcccttcacatggagaatgacaaatttgaaagccctgatcaggcctccatctacttttccaggcagatttcccccctgcacacccaagcaaacccactagactccagagattctgtacaatacataatttcctaaaccaagtgcattcttttgtaagtcgatgcctttgttcattctgtttcctcaacctctaatgcttttattttcatctttctttggccaacttgtattcattcttctaggcttgcaacaaatactacctattccatgaagccttgtctggttccycatgattggaattcatgttacttcttcttcaatttattcagcagcatgttgttcatcattcccttatgcatcttttacagtatgtcttgccctgtatttatgcacatctcatctgccatgctagatgagaatctcgttgatggagggggccagattttactcatacacacacacacacacacacacacacacacacacacacacgacatctagcactgtttttyaccgggagtaggtagttaattcatgtatgctgggtaaatggaaattaacatgaaagtagaagctttaattagtcagtcaacctctgagggctaatgatgtgatcctcctctctrggagaaaagatgccctccagaggtagagatacagtggcaagtccagacacatatcacaaacagatctgggttgaattcstaactttcccacttacatgctaggtgaaattgatgtctgtgaaccttgtacgatagagagaatggtaacaaatttacagtgctcttattattcagtgccaaggtatataaagtgcctactgtagcggttaaccaatagcaggcattcaataacagttagtttccttcctcactttctattcctcttgaacaccatactaacagataacaggtagactaaggcatctttgcctgaaaaaaatacataacatgtattttcatgttgtatgtctataaagattgacagaagataataagataaaagttttttaaataaaaaattttttaaatttctgacagttttatcaaaacaacactaaggaattatttaaagccaataagaagatgtattaaatgtatgagattctgaaagcaaaagttgagaggaatgaaagagacagaacagcaaagaaacataaaatcccagtgggaggttttggactaagtaarggactacaactagagccagtttggagaaattatgaactatatgactttatcaagaaattacagaaacccacatgtctgtggattatcaaacaaattacttcacttgaatacatatttctctgcctattttatagattccatattstcctcctgcttggagttggtaactccatcttctctaactgattaaataaaattgaaaaaggccccttgtggatattccttcctgccagaattgatctaaatctgtcctaggcaatgagcctcttccttgacaaacagtctgccttgattaacttcacaacaagttagttcccttagagcgctcacccatctgtaaaacaggaaatcctcctccccaccaccccagattaccaatctgtagggcatttcttcaaaactcaatacctgctttctttttggcagatttgataggaatcaagtattcattttacttaattatttcactgccaattgcggttatgcctaaaactcaaagatgaaacacctacaagcaacataagcctgtttgcaggtttcatttatctatgatttctaacctttgattcaagacaggaagcacactggccaagtgtattgccatgatgcagagcctagaggattaataattctttgcagtttgtgtcaaatatccctgctaaaattggaggtaacgagaaattcctaaagacagatgagatctcaactttaaagttatcactccaaacttaggttacagaacattttcccttcgctctgtggttaactcttagtaccatcaaaagcagcctggggtcttgcagaacaggaacctgtcatctcatcacctcatcattcagagtagactgtccttgtttttctctacagattgtacatgcttttattgttgcatttaacaaacaaaccaaatagaaagaatttgcttacagtacttttttgcctattagtctcataaattgtgtgaaggcagagataccatcttgttcatcttttgccttcagcactgaacacactatttggagttcttaagaaacacctaagaaatactgggacccaggtaagaagagaaaacagagaacaaataaagggacataggccagtttcaagrtggtccccagacaattattgtaatcatggttgttgagattgtgggatggaaaaacacagtcatggcttcatattatgggctgataattagagttctggatsttgctggtttgaagyaccactggccaggggtcagttagacagcctgaatgccttttacctctggttccttgtctagtcatcttccccgcatcatcccarcttgccttccactggatgctgacttttgtagcaataattaatgtggctgagtttctcatgcttttctgcccaatttatacacttctatcagagctgactggccaacttcaggtttcccaattacttccttatcaaagcccagcttttgctaacatgcaaaaaatggtatcgggctgggtgcagtggctcatgcctgtaatcycagcactttgggaggctgagacaggagcatcacttgagtctaaaagttctagactagcctgggcaacatggcaaaactscatctctacaaaaaagacaaaaattagctggcagtttggcgcacrcctgtggtcccagctacrcaggaggctgagatgggaggatcacttgaacccgggaggtggaggttgcagtgagtcackatcgcgccactgcactccagcctgggtgacagagtgaaaccccatctcaaaaaaaaaaaaagaaagaaaaaggacaaaactgaaaatatgtatatatcaaatagaaatctctctttctttttttcttctcagtagaaaygtttccctgcctgtcaaattgccctcagtccatacgcatgtttcgctggatgtgctatkgacttcctcctgggaactttctcttgttytctatgaatgtgtcaaacttcgaacgagatttctcttcttccaaggaaccaccttctgcttattaatataaacagcctctgagcagaaasaagtcttctcctcaaaacacgtgccataaatagctactgaattctgttgagtggctgtggttactcctgtgaggactaatcacagtttcatcctgcagagttcctgtaattagagttygggacaccctggtgttactctagtaatctcaaggagacttgttatatttgctaaaaatgctccaaggagaattgccatcaagctttcattttggaaacaaatagatgtctgtgagattggaaatggctgtgagattggaaacaggtttagagatgtcatgatatcaataaaagaagagaagattttcttcatttacagtgtttgggaactaagtactagattgaagattttcaagctctgatttaagtagacccaaaattcttcttagggacctgaggtatgctctgcagttggagtggaagagaaaccagaaattctgtttcccctgtctgcaatcaaatgttttatttttatatttctagaagtttccttttgaagaaaaaaaatgatatattctggtaataaaattttgaaaacattgcccatagattttggtgagagaaacagacagactgacaaacagataggtattggccaaagtaaatatctgagacctctgtccatcctattgccaccactgtacccaaaccatcatcatttggattactacctttccccactacctgggatctcaacatcctgtcttgcccaatctatggttctccaatccattctccaccctaaagccagaaagatctgttttcgatgtaaatctgatcatctcacatctgtttaaaatccccaaaggcttcccattactctaaaaagagaaagtatccttcataagatctacaggattctccatgacctggcctctccttccctctggtctcatcttagactatcccagacattgatcttctttcaggtttgctgcctgctgtttcccactgcagagcctctgcctgtgcagctccctctgcccaccctgctgctcctgctgtgctcagattagacagcagctcctcttggaagccttcccaacctggtccctccagaatagtttccatttctctccactgtatactctcatggattacttgcccatctgctttttatgatgtgttgtactggtaattatttcttctacatctgttttgtctctaaattccaaaagtgccttgtttctgttattcacactgtatccccaaatacctaacataatgcatggcacataatgagcatttattgaatatgactgaagccatgattgcatggtttcaggcatctaaaagttacactgtattgactattttcagagcagtcctacagcctctgattgctttaccaactggaaagatagtactgtggagtagagcaaggcccattgcccagtcagtccagcccaatggaacatcttctgctccaagctcccatagtatttattgccaatagaaccactagtcccagatctggcactgaggaaggacgaggtaaatattgttagatagatcaatattaaaataaatgcaaatttgtactaaatcattattgcatcccttaaaagttgagttgaaacataggtttctgtgctgatacatattattattgcaattttttcatgtatctgtataccagcctccctgatatakgagttttacatatgttacctcaatgaattcaaacaatatctattcaggcaggattagtctttaatttacagagtaggaaacagaatttaagaaccttatctatagccacagagcaagtaaacagcaaaacaagtgttcccaagtcttacaaacattttccattatcctgttgccwaacatgttgtcaatgttcagtaaattaatgagtggatgtatggatgacttacactaggtgcatggaaaaatgtcccagcttgaaaacctaagtgctaaagtttaaagactataggcctggcatggtggttcattcctgtaatcccagcactttgggagaccaaggcagraggattgcttgaacccagggcctcaagaccaacctgggccaacaaagcaagacctagcctctacaaaacatgaaaacattagcccgacatggttactactcagctactcaggaagctaaggcaaagatcccttgagccccagagttcaagtttgtagtgagctatgattgcgccactgcactctagcttgggtgactgagcgagactatcccacaaaaaaaaaaaaaagaaaaaaaaaagaaaagattgtgctattggaataaaatactaataatattcacataaactataaatactaaaagtataaacataatgtactggatctctttaggttttttcctctaaatttctgaactattggcaaatgctagggacattttctacagacattttattcagttaaatagagctactgaacagaaccttactgggtgaaagtcagactgcagcacagtgtttcagctatcagcaatttttgaacagtcactgaggaaagagtactaaaagtgtttgcaaaaatgtgtacaagaagagaagagaatgatgaggtgattccaagtgacttacaatatgtaayagcacaacagcagcagcagcaaamacacacacacacacacacacacacacacacacacacggtgcttacttcttactttgtgccaggtactgatctgagggcttttcatctataattcattaatcttcacaacaacttgtgagatagtttctaccatgttttattgaatctaggttgtccttgattttaagatgtaccctatgtgttaccaaaaaaggaaaaattctgccaattcaattatgagatggcattgatagtggaaaaacatcttgattttagacataaaaattttaaaaaatcttagagttgatgtcatacaatattttaatcccattttacagatggggaaacttcaagagaccaaacaagatgaggcaattttctgaagttcagacagtttgtgttctgaatttagttcagttcagtttagcctggttttgtgagcaccttttcctctttgcaaggggcacagagataagtaagactycacctaactctcatgagtcaagaagtctagaaggaaagatacacctacagataaatcaactgaaatgtagcctgctaagcataagaataagaccacatacaaggttacaatgtggcacagagagtggaagaaatagccttctcttgatagattcaggaaggattcccagagaaagtcatggttttcaaaaaatgaaagttgcagaattttttatattgatcaatacttctactttcataacaatgttagaaaaaattcttggccaaagaatttgatttgcactttataaattgtggtcatgtgtgtctacaagaagaaaagctgttcagtggtccagctcatgtgcatgtttccaatgagacttaggaagggggagaggctgaaggaaggaagctgagccctcaagaatatgagattactatattacagaggcrgcttccactaagaaaatgcctaaagatcaggctgcttagtaggtaggggtgggcagatgtgctaccacccctctgctagtaaatctggatgaatcatctccccattcaccaactyctttatgagcacctgatgaggcttcctaggagctctacaatcccagagcagcaccctatactaattcctaacatagcacatatgagactcaactgtaactgtatttacagsctttgcacttgttgttccctctgagatmactctttcctcagatgcctgtatatctaactccctcacctccttcaagccttgcctcaaacatctctttttcagcgagtcctaccttaaaaaacaccccatttraaaatgcagccttcactgtcaccatagccctactctattccagaatcctgatcccccttaccgtgctctatttttaactttttccatagcaacaatcaactcctaacctatcatactatttgcctatttattatgtttattgttttttgccaatctcgttttactagaatgtaaaatccatgaaggcaggaatttttatctgtttttattcactgatagatcccaagctcctagaaccatcactgacatayagtaaatgctcaaaagtatttgctgaatgaaaatgagtragtggccaaatgaatgtaccttcttacccatattcccaaccaaacatcaagctgtacaactgtaggaagaaagcctttgctgagtcccaacaaactatagagtgcctggcacatagtagagactatgaaaataatatcacatttaatatttaaatgaatattatctcatttccatctgtgggaatttgattacattctgaactcaatgcttttgcctgggtgagtaaggaaccatatgtcctctctatctctagtcaacaggtgataatgggaaactttacgggcatatgagatttagaagggtaagttccctaatttcaggtcttctcctgctacagtacrgcctgtagtttccatccagttttctgaaaaatcataggcaaartaacaaactcagtattggggcaggcaaagtgattgcccaactgtctgatattgtggtgtgtaaatgtcatyacttaccctgatgagctgctatgatggtactaaggatttggaggagtcatttcagatgctcttgaatgtctttctcccgtttttcatatactcatgagtaaaacgagttttatccagcacctctgctgagctagggaccgtactagctttatcatttgtcagtccataaacacttaaaagagtgcyactggatagcagaggtaggcttaagttgtttatattccagtgagtaacastagaaccagggtatagaatttacaggggaaaaaatttagatttttttagactcaattaacaaatattgagtacctactggattctaaaagctctcatgtgtaattcttataaggaccctgtcggacagggattcttgcccctcatttttcatatacagaagcccaggtacaaagatatgaagtaatttgctgaaaatcatactgcagcttaaaatagtgagctaatatttgaatccaggactatctgagtttaccrtctcatgatcttcacgagtcatgcatatataaacttaaatgtttgaatgataatcgwctattagcaataataaaattccatgccaggttatttcttctttttcccaccccaagcttactaattaatggcagtaaaatactgaaaggtgaatatcaaagcttgatctacatttttagcccaattcagaaataaaagactgtaatcagggctgtgtcagcytctctgaaatatctcagttaacatatctcaattgccttatacacagacccagaacataagagctcttgaaagtgtcataaaacctgggctgttcatccaagcagtcttcctcttacccacatttaatttttgagtagcmagctgatggcatttgggggaaaggaaaatkattttaagatgattaatctttgmagcttcacccagccctgaaacctgaaatgccattcactgtggtccagtgagttctggctctgcgcaggttcagatttgcctctgtttccctcagataagagacttatgagtcaacagtggagctcagccaatctgacagactgccaggacagcctgaaagagaaggtgggctcaaatgggccccgtccctggagactctgatgacttgtccaaaatgatcaacatgcaagcccccggacatgtgaaatctgctcataccacatctcttggtgaattgggagcactgaggacttaagagagagaaagagaaagttgttccccctggaagttatgcttcttccctgattatactctaaaagctatagctgcagggaggcccaacctgtaagggcttctggttggtgtccaattagttctatctgcagtcatgacagtgattgcctgattttttaggaacaatagaaatggacatttgccaacaccctcaaaacatagaagcagtctgttgtaatacgaagagtatctttaaataataccaatctgctttataaggttgattaagtggtataacccatgtcatacaatccacagaacataataaatcttcccttcgataaaatgagaataatgcctacattttgggagctatcttttgggtcacagttgaatacatcctagagaaatgcagttggtctattaattattatagaagctgaagcccatagaggttaagtaccttactcaagatcacatagtgaattatgttgaagccaggactagaaatctgcactcctaactccatctaagcttctttttacttccagggtgcctcctctgttttcaagacaaatatgcactaaatgcacgagtggacgaatgattgtttttaagaagataatacaaatagaaaattgtgatttttataaaataagagcaactaaagtttagatctctctgctcccagcatcctttcccatacccctctagtgagaaaatgttttgaagaagtttactacatatgcatttttatgtcacatktgtaaaaacaccatccttatttcatcycccttccagtacttgtgggacacttgctcatctttagagtagagaagaggtgaagtaaaggaacttttgttttgccagttattatgtgaaatgctcttcctttatcatctcattgaatctctgcaaatatgtgagatgtaggaatgacaaacctcattttatagataaaactgaagctcagattactccacttattttctcagtgacaatcagctagaaagagtggactgacttaaccgtgtgtttcttcattccaacatctatgcttcttgcactattcatatgtgcttaccttgacaatgtgaaaatgggtcatatgtgtccaagccaggcacagtgggatggagcagagagcagactttattttcygttgctagtgttctttctcttgctgcatagaaaggtgaggaccaggtctcctctaatcaagcagaggcctcaacttcaagaaatgaaggaaattgagtcaaagcrctctgttccttgcatcttaatgttgtcaggaaagcaaaggcctccmtagaccaaacaagttcacagcacagaagggagtaatttgctgattcacttgttcatttataaatccatctgtgaaaactctgtgctgagacttggtctgggagctcctgatgttgtttctgatgtagtaaaggagataagacatattcccactcaagactagaagctgtaggcttcccagagaggtaaaagagcagagtgatttgcaattttagagaaggaaaggctgcttcttctgtatctcagcttctttatcttaaaatacggaaaattatatttatcacataaggtttttgtgagaattagaattaaaaccttagttcttaacttctttatctacaaaatagaaataatcatacctatatctcaaactgtttacagggattcaatgagatggaattacataaatgtactttgcacacaacctggccaataacaggcactcagtgggttgttgttgttgttgttgctgagtagttgttttattccaaagaatctttgacagaatcctcaaactggtggcccttgtcttctacctgccctctattaaagcatgttgtttcttgtcctctgttttagctttacattactgccrtgacaaatttgcttcctccattttcaaatcttagcaatggcactcaagtccttttcatgttccatctctattctgcctttctcttctagttttaaggactcatgtgattagactgggcccacccacataatctaggatagtctccccatctcaagacccttgaccttaatcacatccacaagtttcctttgccacataaggctctagagattmaggcgtgaacatctttggagaaccattattcttcctaccacagtctgccctctggcccccaaagattcttcttttcacataaytacagggcgtaattctactaagctttccaccactgtgtaaccaggatccctttcctacagtttccaaygacatgcttctcatttccatttgagctgtcaccctcagcattctccaagtccagatttccataagaagtatttaaagcttcactggaaatatccttaaagtctgtatttctgcaatctcttcttagaagcaatctaggttttcttctatcatgttcctcaacattcttctagcctctgtccacttcccaattcaaaagccatttctacacttttaggtatttgttacatagcrcctcacttccagtaccaaagttgatattagttttctattgctaccataacaaattatcacagamctaatgacttaaaacaacacaaatttattatcttatagttctgtaggtctggtacagatctcaccagamtaaaataaagctttcagcagtctgtaacccttctagaggctcaataggagaattgttttctgctcattcaggtcatcatatggttgtaggactaaggtgcctgttttcttgatggctgtaacctaataaccattcccagtttgtaaaaggccaccattttccttggcttgtggtcctcttcctctaactttgaagccagcagtggtgggtcaagtccttcccaagtcatatctctctgatccattcttttgtcttcctcttccacttctaaggattcatgtaattagattgtgtccacccggataatccaggataatctccccttctcaagatccttaaccttaatcacatctccaagtcccttttgctatataagataacatattcatagactctgagaattaaagtgtggacattttgggggagtgagttaaggatattatttctcctatcatatccttgttaactatgaaacacatcaaataatttttcctattcttagtgatactgtctttccatcctcatcattcgctgctatcctagctttaaagtggtatagccaaaactaaattccctggtctacatagtaaacaccaatacttttaaggtccatgattgttaaatattacctcagtctaagccaagtggagagtgtgagtgttttgagctggaaagagttgcttgcaaaagagcatagaggttggtatcgtaggaaattcataggtcttagaagcagacaggctttgagtcctgccccatcacttgatagatggcatgacattgaacatgttgtttaaattatccaaatctgtatttcctcttctataatacaaggctaatatatgyactgcaggatagctgtgagaattgaatgtgtcctctaaaaactactcatgcatcttttttgcaggctagtccatagtatcactataagtgttatcatcaaatcatgaaatccttaggtataagatctaagtacaacatttcttatcagraattccaagaattctaagattaggaacatgagcttttgagtgagacacatctacctatactttaatcctggttctgctacttagtatcttattttcatttcagctctttatatctcattttctttatgagaccaaaaatgcttacatggcagaattgttgtcagaaataataacaaagaggaactcacctgtgttgggtactttacatgtgtcatcccattgtcgtatctccgcagcacccttttgcrttwgtgccattactatctgaatttcctaaataagagaatggccatctatggtaaagtggttatctaagaggttaagtaacatgcccaaattatacagttaagaatggcagaactgggacataaacccagctctcctctgtcttggaagcctggcatataacccatatgctatgttgcctacccaataaattgagtgagacaatgaatataaaatgcttactacattgtgmgacacctaaaaagcactattttgttagggtacccaggtatctcacagccatgttgcatagtcatgaggatgagcagctgcttcactcttcccttactagacttccccagttggcaaggggccaccacacattgaaattcaggaggggtaggagggatgggagagttgttacattattcatgtccaattctayttgtctaatggccttgctaaaagcaccctggatggaaagtgtgagtcttaatggcattttataaaagttgctgtgatgaattaacacataaagcaaattaaaaacagcttatcgcttgttaaattaggtgatggggcactgtagcatttttcccagatgtgaggatccaytaatatccaaaggagccagaagctgctgaaatgtgtcagctgcttgrttttagggacctgacaagtctgaataaatgtaatcctagaggggcagattgtccaagatcaatagagctcgtggaaagarcctgttgctgagctcctcaggaaggacacctgcagctaacagcaggagtgggaaagttccccttaaggactcttgggaatagaagaacacaggcgagtgaatgtctgacctggtagggacctccaggaatagtcccacccccacttcaaatgggaatgcagagacatgaaagaagacgggctttcaaaagtcacctgaaacattttcacagacctgtattgagggtctactttgggtccggcacactaccaggtcctgaggatacagagatattttagatgtctttcacatagtccagaaaacagcttttaagtggcacaattggcacacagatcccctgattcaaattctaatatatttttcagaataacagttattataataatatcttacatttattgagccctcactagtgccaggctagtgttacaatactttacatatattatttcatttaatcctcaccataactcttttgagatagatggtgttatgatttatgccagttttacagttaagaaaatctgaggcccagaggggttaagtaacttgcctaagatcacatagttaaaaaactgcaaacctaggcagtctggctccagagcctgcctccttggctactacttgttagcctttctgatggtttctctacctcaactccccatrgyttacatccagaaggagcctggagtcaggccagcagttcaaggactttggggataagaaatacttggacaaggactgagcagtaagggagtttcaggaatttagggaagaagcagttgtcagccctgaagggaaggttaaaagtctttggcactgctagatcgtgagcatggccagagggcaacaagtggggaaattgagccacataataaaatggctaaggaagcagattttggagtcagatacacctcattttatattcaacctccaccacatgtgtatgtgtgacctgggccaggctccttaacttcctgagcctccttccctcatctataaagtggggatactaatttttacctttagggttgctgtgacatcaaataagacgatgactatsaagtgccagaccacctaataagggcgtaagtagtagtagccatcatggttatcatcttcaacaccttatcatcaccacctcccaggatgaatgagggggcaaggtgaagagcactgaactagacttggatctggagacccaagttctggtcctaggttgctgccactaagctatatattctggagttagtcagtgggccccactagatctgtccctcatcttttaacaacaacaaaaaaaagtggggaggatagtactatgtctgtcataccttcttcacagcaactgattgagtcacaataaggtaacttttgtgaaaatgctttgcaatctatagagagtgtgttggggttccccaagacaactcccaggttgatgactcactaggatagttcacaggactcagcatgatcatgctcatgattatgatttattaccacaaaaagatatgaaactgtcagataagggagcaggaccataggacaaagtctggaaaaaattagctgcaagtttccgagagtcctctctcagtagtgtcacacaggaagtgcctaattcttccagcaacaaattgcgacaacaggtgcgaaatgttatctaccagggaatcttattagagactcaatgtccaggtttactgggggctggtcatgtaggcagcctctgcctagcacataccagaatatcagactcccagaaagaaagcaggtgttcagtataaatgatattgtttgtacaaacagtttaggcacagtaagccattcttatgagaaaatggtgggaaccctcccaaaatctaactttccagatgtcagccaagggccacccttacaagcaagaacagcagtctcaggcctgctacattaactcctttttgcacagagtagaatctatagaaaagatttgtattagcctctacccaaaaggaaaaagggagataataataataacattagttcatacttactatttgtcactgtgtgccaggtccatttgtacatgctttatatatattaccttatgtaacattttacccatacagcaactccataatggaggtattgctatcatcattgtcatcattatcactatgttgtatatgaggaaactgaagcctgaaagagactaagtaacttgcccagctgactagctgtaagactaagacatagtaggagcaggacatggacccagtagtccatattcataaccacactgtaatacactagactgcacatactataggcttaatgctgcatatgtgttatttcattaaggatcacagtaaatctaggtgaatgttgttactagactaattttgcatcaaaaaacctgtggctcaagaatgttaactaatatatgtcacatcacaggatcaaagaagtgatagcttcaggagtgggcattggcctttccccagctccctgttcctgactggtactttgtctgagcctttggcaggggtggtcaaggtgaaaatgattcattccgggagcttggaccaagaaaccctctccaaattccatctctgggagacagtgttaatgaaagaagggactacgttgcaattaattatacttttcctgctgtgtttgagagctctagatgctgtcttcagctctttcttgttgccatggcagcagatgtgacatttctttgatgggcaaaaaaaagaagaagaaaccacacttggtcctcagtgtggaaaaatctaaaataaaacaaattttttagaaaaatctgttccccagatcttgctagttttgcatacatagtggttatactctaaggaaattcttagaatgaaatcaaaggggaatagatagacaggtagtgaaatctgcttctctgggaaagtcatatgctgtatgtgtggggtggtgatttttgaaaatgggatatacagcaggatgtggacaatataggagtggtggcaaatgttcacctcttaatgatgacagctagtttctaaggtctggttcatcattttgattctgattccacctccctcatgctgccactcatacatattacagtgcattggccttaacaaatgcttagcaaatgctttttagtgggggcagcatgatacagaaagcaattgtaattcacagataagtgccatgatgaggtaagctaggcatcgtatggaagcacaaatatttgtcgtgttgtttatatgatttttgtctatccatacacacacatacgcatagattttttaatttactgcattttaagcatgtattcaggtgattacattaacctcttcatccagttgcagtggtggtccaatatttcattgagtggaggaatcaccgcctactatgggtggacatttgttaccattttttcccattataaaagaaacagttctacaggctgatacatctgagatgatttgtttacagtacaaaatgcttcatttagaaatatagccatgtttctctttattattttactttttttagtaattttaaaaatttgattgtaatgggaggggaaaaaaatctcaactaggtagtaaagtacctttcttatcttctattatcaccttctaacatctgatggtctccaagaaaagaagcagatctcagtttgggggaatctataggccacccctgtaacctccaagaagaagcaagaactaactttagtgtgttgccaaagcagtgagagtgtggactgtgatccagggaatcattccgggagttgatatcaagtgatgataggttctcagagcaagagcaaacatttgaaaccataaatcctaaatctgtgctgccagagattcctaacaatgtcctcttttgtcctttcctccagagccatgttcgactacgacaagagcaaggacagtgggctgccaagtcaaggacttagttttaaatatggagatattctccacgttatcaatgcctctgatgatgagtggtggcaagccaggagagtcatgctggagggagacagtgaggagatgggggtcatccccagcaaaaggaggtaagaatgccttttgtactagaatatttgcttgtcagctatccagcgagtggagatgagggaagaagaaggtgggagaaactgttcacaaaattaaatttatttaaatgggatagtcaatctgcaggaaaattgtcagtggtgacaggtgacatgaattaaaaatcctctttttcctatattagggttttaccaaaattggtgactgtgacwagaaataaaggaagaaagaggatcagcttacactgtgttcctaaaacttttaccagtgtgtgcatgtgcaaacttgtgcttatcagctcatatgccgacttacaaattcagtccatttatttccagagtttcaacatttaccaatgaatgttatagaaaggccaagtcgaaggcaaatgaagtaggcaatttactaggctaaggtcctggctgtgtgatatctccaaatattagyagaaaaaaatggaaaaccttcatctcaaattcaggtgcttgggatgtgagctgtcaaacatctggtgaggtctaaggactgggtttacaattttttttctttttttactgttttctttactcttgttccccacctcacaacttccaatagccaccaagatatttagttctgtgtaagtgtttcctaaatcaagagtatcatgctttctcttccaagcatttcttcagctctgcttttgaaaagcagaaatgtgcttcagaacagccaactccttaatctgtcccagcagatccatcaccagacaggaactttccttctcacaaatgtccctttggcaccaagatgtccaagaaacagaaattggctgtatcccagagactagatatagtacaaaatcagtcaggaattatgcttaataaaagcaggcactagcttttctcaagctgcagatttctcaaagggctttgatcctcatctccaaacacccaaaatgcctttgtaaaatattcccagtgaagctgggcattcaagtgctactacacatcaagtgattgagctagtacaaaccataatggggagatggaacttaaacctcagaataactctgtggggtatttgtgctcccgagacaactgatcctctcttctctctgcctgtggtcgcacagcctgggaaagaatgggacatggaaagcagagggctcactggtcctcagctgttctcttacctttagccaggaggagtcacagtgaaggtgccgaaattccagggagcctctccctyccccatgccagtgcctatagatctcccaccagcagagttctctgggtttctttaagcctcttggctcctggataattgcctaacattgcttttccagggcattctgactgtagaatggctgtgtgtgttttctgaaaggttacatgtttaaagcattgactcagcactggcttgtttatattccgggtctctccatttccatttacttcaaataaaatgtcaagacaacgtgcattttggtttgctttgatttaattattttgagctgtctgaagagctgttctctagaagaaagagccatcttgttgaattatggccccaaagatagtaatggggtggaggaaggaaagctatgcggaaatagatgtcaggtcattttaaagaaatcctctcactagttggagctgcctaaagatggcatggactatctgggaagatagaaaagggattcaaattttggatacaggggttgaactatacagttttctgactctttccaaccctgaggttctatgattctaaccaatcttatcaagtcatttgtttgttcaattagctcatcatttttctccagaagaacattctcaatgctattcctcctgaataattttccacctgctggtaatcattcttgaattagctatttctctcttattttggaagagaaccatcttaacaaccagagtatagctgacctggaaaataagtttgattagtgactgcaaggttgatatttatttacattctactttttatgaagggtgcagtagctccacctcatatatataatatatattatatacatataatgtatagctgtaaatacatttctgccaaattttctttttargattttaattattttcaaaatagttacttttattcctttaagtatttgtaaaagtaataccttttattgtagaaaggtgggaacatttagaaaaacataaaaatcacttacaattctaccccacaaagagtacccatgtacttattttaatgtaatttaaaaacgtacatttattaggttgatgttatttttcaatcattaatttctttctagcctgtttcttgagtataatttacctagtagtgctgatctggaaaattttttaaatcttataatggataacatcagtgtatgactttatatccttttcaaaaatgtttctctattgataatgtcatttaatcatcccaaatgaaaccatgagatgaagagtatgaatattatcaccttccccctccttttttctgaagatggtgaataaattttattgaacaaaacattcctgttgcacgctagacactgttgtaagccctttacaattattaatttatttaaacctcattagaaccctatgagtaagttgctgttattatccttattttacaaatgaggagattgaggcacagagaggttcattaatgtgcctgaaattgcccgtgtagtaagtggcagaactggaatttgaatccaggctacagaattgcacttaagacatatgaaatcttgccccctacagatacaaaaataagagctagcaaaattcaattcagcaagcattgcttgggcagcatctgagtgccacgtactattgttggttcactacctggagcccatcacttgtgggaccaacatgtaactgtggcacagctactctgcgattagggcaatgcaggctatattgtaaaggccaggaaagtgaaacggcagcagacagagagtgaattccatctgataacagcactgatcatgtattgcaccaggtgctttcaaatacatcatttcaatttaatctacacaaaaacctcataaggaaactgaggatcagagaagtcgagtaacttacccaaaaatacacagccagccactgaccaaacaccagtctctttgatagcaaagccaggtggctttacactacaccaggaacaaactaccctaggagcatatgccaaggaaggaaatagaaagtcagataattcaagtagcttgccaaaattacagtggcagcagagggctaagcctagattcaaacacatgcctttctgatgtctctatgagcaactgcaaaggtttggggctcttcttggccctacagctctcaagtctggtggcagggtcttttaagagagaaaaatggaagtccatgtcttgctcccacctagcataaagggactgacttggcagtgagcacctgaagtagggtacctgtattacttcctttttacaagtaaggaaactgggaccagtaatgagaagtgacattatgggcagcgttatcataatcatctttgtagcagccttttgtatagtgagttattactatagatcagacattgtgctaaacaattttcttgtattatctcatttaacattcattataaatttttgaagtctgcgctactattctaattgtatcaacacaaaatctgaaatcctaagaggttgaggaccaccctaaattatagacctagtaagtggaagaggcagaattcaaacccaggcttgtgtgactttaaaatctggactcttagcatagaatcacttttctgagattatgtagtgtataagaggccaagctgggttttgttccatggtatctctctctctcttttttttttttttttttttttttttttgagacagagtctcactttcgttgcctaggccggagtacaatcccaactcactgcaacctccacctcccgggttcaagctatcctcctgcctcagcctcctgagtagctgggattacagatgcccaccaccatgcctggctaatttttgtatttttaggagagacgagatttcaccacattggccaggctggtctcaaactcttgatctctggtgatctgcccgcctcggcctcccaaaatgctgggattacaggcataagccaccgcgcctggctgtcccatgctctcttaagccaaagagattattcattgttccctagtgactggtcacttgggctctcagatggcagcatatggctggcattatataagagtttactcacctagctgtcacagcaagcctgtggccactaatgtgggtgacattctaattctccctccaacaggacctgtggagcatagggataggaactccgaaggacaaatgatgttcccactgtccaatgctccaagcctgacccaattatgggtttggccagaacctaaaaataccagatgggagagagggagaggaagacagttgggcttattaaagcatggccatttggtgctctctagagatgtgaaatgtcagaattgattgctcaaattttgccattccatttatgtttttggtattttggycagtgatgagacttggacagggaggattatttctgctcaaacaatctaattaattgcttgagtctaagtgtgagtggggaaggaaggcagttgttgtcattgagatttggtctgtctcttcaggtggtccacaatttctttaggtgaaagcctttggaccttaatatttactagccaaagaagtcttactcagtaaaacaataagaaaaagtgatgctagacttttacctagattcttaccgggaaagtaagttgtgaaatggcaaatcactttttatgggaaaaactggttgttcagcaattcacttaaactccctgacctgattgttttcacaattaggtaaagaactagtagcccccttgagagtttatttatttamtcattcaacaaagtctcattaagcatctactatgtacccagctcatgtcaacccctggattatagctattataggtgaagtgcttagcacagtttctaaaacttagtgtacattccaataatagctgttttccatttttcaaaatttgagctttagttgccagaaaaaaaaaaaaaaacaccacgttatttagacccctattttccagacttaactctcatttcaacagtaaatcattcacatgcatcccagaaagagctaggagagaggaaagggctgaggcagatgaggaagctaagccacagacatagcctccctctcaaggaaagaggtttgcagagaaccccaagaagcagtactgcaagcctctgtgatgggaatgcactattagggttgctggtgtgctgaggagatggatcaactcaaatagggatttaactaagcagatttccatgtttaaagtaaatttattctgaattttgaggtcaacttcttgtggtatgctactaactcgattgtatgcttaaatttggttgtggtttatttaataattaataatattcatagcattcaggacattagggagatggggatgcaagggtacattggttatcatttgtgaaaacctcagcctagacttctaaggatatgtatgtgccttcatactgtggaagctgctccaaaaatctcacgtttgttgagaatttggataatgcaggcttgggaggtacctgaatgctgtttcccaaactgagtggctgtggacagacactgaagttagctgtcagagaatgtatgttcaggctctgtttctaccagtttctgatctggcaagcttcaagtctcagtttcttcagttataaaatgagattgataatacctaaatccttaggttgttgtggggaccaaatgagatgatgtaaatgtgaaggaactttattaataattatatgttgcaacttcagcagccacttatattattattaatgaaactttcaacccaaataggaagcaaagcttttcaacttccttcatgggtgaactggaagtatgtgacctccatatggcttcaattttttttttttactttctctattacccatttgaagattaataataaactatagcaaatggtaggtgagtgtatgtgtgtgtgtctgtgtgtgtgtctggctgacttaatattctttgcaaccattttaagatttaagggatgaaccattaaaatcttcctaacagagacatttctcaagaaaattgaaaaggataaacatagaaatggggttggggtgcagggcaggggacagtattagaatgctctgtccaaacagttctgagagttgaatactgagttcctcctgacattctgtatgtttggaacctgtgtgagttctgtgggtttatgcagaatttatttgcataccctgatcaaataaccatgtattctctgcatactacagccattttggcatcattgaatgatgccaaagcattgactatagcccagttaatgcaaagaagctgaaataaagttagggctgtaacaacagttttagamgaatacaaagagatcaatataaattatcatttgcccttggattaaaatcgagaaaaggtgatgaagtgatgaagctcaaaggaggcattttatcagtgagcattttccacttggcagcttatcttatctgaaatctgtcttgctttctccccaactgttgtatgcctggtgcaagtagaaactcttggtggaacacattgttttacttattatttatttatttatatttatttacttttgggggagacgaagtctcgctgtgtcacccaggctagagtgcaatagcatgatctaggctcactgcaacctccacctcccgggttcaagtgactctcctgcctcagcctcccgcgtagctgggattacaggtgtccgccaacacacccggttaatttttgtttttgtatttttagtagaaacagggtttcaccctgttggccaggcgggtctcgaactcctgacctcaggtgatacacacctgcctcagcctcctaaagtgctgggattacaggcgtgagccaccgcacccggccttacattgttttaatatattacgttagagttgaaaaattttgttcagctgtttccactcagatattctactctcacactgaaataaatatattctgcaattccattctgtaactatagaaaccctgatcttcactgtgtttcagttgggaacacaaaagagctctcagttagaaaggagtgtgctgttaattattgatctatgaatagcttagactccataaactattaagtttctgtaggttcgggttttttctttctcttttttcccccacatctttaaatttaaagctagcaatatttaaacaagaagtcatgttaaaacaatgcaatgaatattatttttgctggacaattatttattgaggacttgctataaaacaccatcaagtgataagtgggcttttaccttaaggtacatacaaccctgtatatgcagtgcaaatgtaagtaaacacaaggaaatcaagaggtagtgctgacatggagactgttccagttacaaaggagcaatcatgtctgactggaggggctcagaagaatcaaggaaatatttagattattttccactttttcaaccctggccttcaaacaggcgggagtccacccaattttattttcctaatatttctcaagcctttccctcttctccaccccactatcatttctcattatttctcacctggactatggcaacagcttctaaataggcccccagcttccttctgctccttccctccttcagtctatcttccacctcgaccagggttgtttatttaaatgctgatctgattttatcacttcactgcttcatatcctctaagagcttatgatgattcccaaggaaaaaaactcaagtccttaatgtggatgaatacccattataaggagtctgtcacctcgctagcctcactgccctatcctatatatcccctatgtaccctgtactagaatctttctgcaatcttgtagctcactcatatcttcaggttgaggaatgtgttgttccttctgtgaaaaatccccctgaaatttccctactgacaaactctttctaatccttcaatctcagatacattgatatttcctccaagaagcccatcctaatgctttctactcctcctttgcaccctcccagtgagataggtgctcccacattgatatcagccatcttgttctacagcattttctgtgtttgtttacaccactgttcttgccaaattcattcttgctaagaattcattgcagtcatgcttttagaatattttttctttgtcccccagctccttgcttgatacatggtaggcagtcactaagtgtttaatgartaaatgaggtagcaggaaaacaatgaatctgcagagatgacagaaggacattggggaaaaggaaagctcaagattatatataacatgtttggttaaaaagtgaagctaaatacactagtgttcttaaggggaagagaaggaaaaacaaagaagaaaaagggaggagagaagaggagaggggaggagaaacttgtttagtctccaatataggtgttcatctttatgaactgagatttgaaatagattttgatttaattatttaagcatttaaatagcaaatattatttttttctacctctctgttgcttacaaataccatgacgtgactctcagtataygtatcggagtaatttcaagggacatgttagaaacttagagactttgtaccaagattttttatatggaacaaaggaagagaaatattttagaacacattttatttgagcttcaaggataggaggaaaaaatgttcttcacttaatatggaacttagtcataaatgccttgtcacgtgagagactctttattctcaatttgctttagggtggaaagaaaggaacgtgcccgattgaagacagtgaagtttaatgccaaacctggagtgattgattcgaaaggggtaggtacaaaatgatggaaacatcaagttctctcagttgccatggatttaactataattaacacatttaggctttcagtagcaaacaaattatgaaggtaccagacagtagagcactgttataaatatattgctgaagttaataatgtgatttctgatgaaatggatttatggtaaatatatttraacactgggagtaaagctgcaagtggttagcagaagcagtgtgttgatgaaggtgatgtaatgactacaatgaagaagaacaagatagtttaggtggtttttgtttctttaagttttttccttttaaattaatgttctaaaatgatggattttataaaaagtatctgctcatcagaaaatatatctagtctgtttcacattatgaagctaagacagtagtcatagaaacatggattatctaatgaatacacggattgttgtgacagacatagaagagaattaatractaaaatttagccatcaaaattagaatatttactcacatatacatgtgtacatgtttttaaaataatagctttataagataaaatttgcatacaatgtaactcaaccacttaaaaaatacaatccagtggtttttagtatatttagaattattcaaccatcaccacaatcaattttagagcatttcatcactccataaagaaaccctatatgcattgacagtcacctcccatttccccaycctcccaccccaacataggcaaccactaatctactttttgtccctatggatttgcctatcctggttattttatataaatgaaattatacaccatgtggtcttttgtggctgcttttttcacttacattgttttcaagacgtgtttgtgttgtagaatgtgtaagtacttcatttcttcttattgccaaataatattccattatatggatatgccacatttaatctgttcatttatcagttgatggacatttcaattgtttccaatttttagttattatggataatgctgctgtgagcatttgtgtacaaacttttctgtgacatatrtttttatttccattggctgtatgcctaggagtgagattgttgggtcatatagtaactctatgcttaacattttgaggaactgacaggctgttttccaaagtggttgcaccattttacatttccacaacaatgcatgagggtcccaatttctccatatccttgttattatatgtctttctgattacagccatcttagttggtacgaagtggtatctcatgctggttttgattttcatttccttaatgactgttgatattgagcatattttcatgtgcttattggccatttgtatatattatttggagaaatgtttattgagatcctttgcccatttttaaattgggttgtcttgttattgttgagttgcagaagttctttatatagttgggttattaaacctttatgagatatatatgctttgcaatattttgtcccactctgtgggttgtcttcattttcttgatagtgttctttggtacacaaaaggttctaattttggtgaagtctaatgtgtgtattttttcttttgttatttttgcttttggtgtcatatctaagaaaccattgcctaatgaaagtcatgaagatttatatcatattttcttctaagagttttataattttagctcttacatttaggtggttgatccatgttgagttagtatttgtacgttgtatgagttagggttctgatttcattcttttgcatatgaattgtcttcttaatttcatttttggattgttcattgcaaatgtacataaatataattatttatagaccaatcttatatcctgcaaccttgctaaagccacagttttctagtgaattcctcagagttttctatatacragatatacatgcaaaaagagagagttttgcttctttccttcaaatatggatgccttttttccttgcttaattgcaccagctagaaccttcagtataatgttagaaatggcaagagcagacatttttgtcttgttcctgacattaacagaaatgcattcggtctttcgccatgaagtgtgatgttagctgtggcttgtatagattttttaaatctattctttgaagagataatactgtatcttattgctgtgttgtaaaataactttcccatcttctctcttcccgttctctttttcttcatatcctttctttcgtctttctatcctagcaattgtagcttgtgaatatcatacagaatcacaagttatggtcaattgctgtcaccatgaaaaacaagaaaaaaaaaagctataatttctcagggattttgaggcccgaatcatagcactgccctttctatttctagaatcataagggagcccagtcattgacataataatttaccctcccctaaaatattcaaatgaaatgaaaatttattgaaacataggatgtcattctacatagaagtgagggtatgtgacatcatgacataaagtcctttcaaacaaatactacttgtatacaagaggtaggttttttttccatgattcctggtgagaatttaaggatagacctcttatttgtttgagatagatggatagatagatagatagatagacagacagacagacagatagagttggatatatgtgagaggatttttactgaatacctaccatgtgccagaaacaggactagaactttagaaggacacaaagtctaacatgggcccttttccccaagagctcctaacatcagtgagaggccagatgtcttttcagtaaggctgaaatatatatgatgtgctttctaattatacatgttaaacaccattaggtatttgccaatgaataggttgtaaattataggacttcgctattgaaagaaaggagtaatcatctgggaagggaagccctgaatggaaaatcaggagggtcagtaacctgggttctggtttcagctcactactaagtcactgttgttctttgggccttattaccaaaataaaacctttaaactacatcagggatgtcaaacaagtttcatctcctgtgtagactaatggattgatagtttatatctggagtattgttttgaaaaaggattctgaggccataaatgatttcagaaaaaaaaaaagagtgccatgattgagtcatctctagcacaacattgggaattattctctatttgcagttactggattcaatgattttttaaggtgccttacgttagtaactctccataagatttactcatgcattaattggtaataaatcaaagtttttcaaatctttatgagaaaatacgtcaataagaagacttgtccagaagtagaaagcaaagaaccattagcaagagataaaatgcactgaggaaaggagagaacaactatgtggagagttgggaaagctgggtcaggagatgccactcactttgaattaaaggcaaggactacaggaataagtcattgatgcaggggcctcattctctgggaccttgggataaattcagcataaagtgaggaggaaaattgtctggaatgagaaggataatagggtgttttaaataaccttatcattagctggcattttcagagcattgtgaaatgtcctgaggagcccagagtgaaagccaaggttactgccctggaggagcttagattaaattagtatctgtgaaagcaggctgtgacaagagccttattagtagtatgtacacgagctataagaatttaaattaaaggttgcaggaataaccagagagcactttatagatgaacttggactttaatgtgactgtcagtgcttgagttacttttccagaactcttcattgattgcaataacaccgagtgctgcaaaacaccaggcaggctcaaaaagagaaatataagcaggcaaacaatgataatacagcatcactaatgttttccatcaatttagggaatgaacagtctttattttaaaaatcaggagcctgagcctcaggaggattaactagcttgcctaagatcacacagttagtaggtgcaagcatcaggttgagatcattttgacaacagaagcctgccctttccattactctacactatacatgattctgttgaagccagaggaagtaaagcattacaaatatgccttaggtaaaagagaaggcttcaaagaggcaatatttgaatgagatcttaaattttcagtaggagtttgccacatacataggaaaaagcatgaacacgatagtggaaattgcagacatgttggaatagggttaagcaagtcaaggacaccagtgtgcaaaggtcatggtgggaattgtagcaaatgaggttgacaaagaaggtcagaaaggccagaaagcttgtatggaaggcctggctatcaggttagaagcttattggattttgaaagtatacatgaagaaatctgaggttcttcatttgaaagtgctcatctgctacaaatgaaatacccaggatttctatccactctgtgtgcctttacaaagtctatgtctacacatgcaaagaaaagtgggctattgtgtcagtagcctagataagtccaacctatgcagatccctaaacttcaaacagccatctatttggataggtctccctaagacccatctcagtgccccagatagcaatgcagtcaagctcccctgggaatgtctattaaatttctaatgagtctctagtcaaaccagcctctggtgaaaacttaagcaccccttaatttcttttattgtccttctacctttttttaaatcaatttcaccgttaaccagccattctgttacttattgagaggtttaggaaattgcataatcttcagagtcaagctgttctgcactgaaaaatcaatgactatttagtgatttatgccaaacttcttttttaagtctataatttaagaaagggaaatatatgtaagagagagtatgagagagctatcagtatccttactatatgtcagcaacgtgcaatgtgtgtctcttttatgttgtaaaccctttctaaagtaaggtatggtataaacaaataaatcatcctatttatccttgggctgggacagaacagagatgatagttgttatttgaagtaatatgagtagccattataaaaacccagacagtttacatacacctctcttttaaaaaaaaaattgtagagacaaggtctctctctgttgcccaggctggtctcaaactcttgggctcaaggaatcctcctgccttggcctcccaaagtgctggaatcccacaatgcccggcatacatacatctcttaatcaccacaagacttcaaaggaaatcatttatttcctctttatagatttaaagaaactgaggcttagagaggtgaagaaaaatwcatgtctgactgattccaaagttcacaatctgcttactatagcatgctttcttttttattgacatcatgtaacacttgtgcaatttaagaaaaataaagaagtaaattgaactgggtttagctttgtcaaaacctaacttgggcataaacttaaatcctgaggagaagctggttttcctagatgatgcacatctttctgaaggagaacattctaaagtgagctcagatatacacactttctcactgtggcctgctaaaataaaatgagggaacaagtcttgctgaatgacttcattcatttatttaataaacctttattagatccaatacaaggcagcttgataagtaatgtggaggtgtaaagacaaataaatcatggtcactttcctgacggagcaggtcttctgggggacagaatgagtgtctacagggaggaagtgattaataccaaaggagaagggcagaaaacacgttttcagtgcagaaaaggagattccagcttgaattagggggcgttgaaggattaggaaaatagggactggggttaggagtaagatacagaataastatgaaataaaacatggttcactttcattacagggaacaatttgtgaaggagaatgaaaagaatcagaactggaaagttagactcaagtcagttttgatgcctaaaattttccaggaaacttatactttatcctgtaagcaataaagaattttaagggttgtgaccaaccagaccaggttgattttctctgggctaatgccctgaaggtacctatatcactgcctatacaggctgcattatgaggtccttctaggcaaagatctgaatctactcatctgtatgccccagcacctagcacgatgtctaccttaaacatactagctactcaacacatagagcaaagggaatggaatgttcagaagtgggtttctgagagatcagtctggcagctgtgggaaggaaaggttggaggagagagactggcaataggaaatgtttgagaaagctattacagtattctgggtgtaagattctgaaaacctgaactcaaaagtggcaataggaaagcaaaataggaaaccatttctaaagagatcagagaggactatcatccttggacatttgtcccgactgttcctagtaatattctatttccttttccaaagccttacgctccctttaagagcagatgttgattatgagagaggggatggggcagaagctacagkgataggttgatagcaaactcccaaaatcaaactgcagctggcattgagaaatctcatttctatttcatagattcttagaactttccatatggccattgacttaatttacaaatgaagaaactsagactcatttctctaggacacacaaagagctggtagcagagcctactattgtgtcacttatcaaaaaatcaatgtgacagtcagtatttcgttagcaagatgggaattttatttgcttcaccagagtgagttatagggattgattttgtcacagcttcaaagtgacattttgacaaaagaaatgtcattactgccctcgaaagaaagctctttaatggagccggtcttggaatggccagagccaggcaaagatctcaaatgtccagaggtgatctacagatccatggaggagaggtggaaggagagccatactgctgmactccagggggcatcaggaaggcaggctttgccctcaaggtgaataaactcagaagaggctactctttgatgtctttgttattacttttcttattccaagccttctaacaccttcctcactggtcttcctggctcacctttcctctcggattctttccctatactgcatgcagtgtggttttaactggtcttatatttttatgtataaagaacaaagataggcatatgtccagggaattttgcagcttcaatagcccaacgtggagacactttataacttgttatgttttcttttgaatgtgataatcacatctatccaaaccttgagttcccttgtccactgagaaccacctgagccagcacacagataactgtctgatcaagatgtgctagtggcttttctgaaaatggttctcagaggaaaccccagtcaagtctccatgtctgagacatgttaaggtgtgtcctatgtaaaccctgaaagccgatggaactcaaggaacattttgggatgaaaaagttcatattattttatgtattcctcatagtctatttgtctcaagttgctgatgacgaaactgctattctgtggaatggcgtggagaataaactacattcyttatgtatttttgtgcacaggcatttctgccacttgggtccacaaagcactgccattgaaactgtcaagttaatctgcaaccttatatacaaaatgtattataatttataactgaaaaatctgttcacagtgcacacacacacatactcatgtttacaatatatttcagtttctaaaagagatatcgttcaaaatgagccttgaagaatcagtaaaatctaatcaggtgtaaaaagatgaaaagagtgttgttggcagaaatcaggaaacagcccggtgtgctcagggaagccaaggaagcttaatattacgtaagtgcaaagcataagtacaaagcttcaagtgtccagagataacgcagagaagttggaaaccaggtcatgaaggtcctccatcttgagggcagtggaaagccttgggaggaattcagcagaggttagattagaatttagcagatcattttgctgtggtgtgaaataaatttccagagggaggcagccccagagggcagggatccatttcagtaattcaggtaagacatggaaaagacctgacccaggaccatagagtagctgtggagagaagaaaccagaaaattttcagcaggaaaaaaaaaaagtgtatcctgcagcatctacatcagaatcagctgaggtgcttattaaaaatggaggtgagcaggctcaacccctgtcctgcaggatcagaatctctggagatgggggcaggaaagctgcattttaacaagctccccagagattttgttaggcatgctactaatttgagatacacaggcacagtggaaaagtttggaatcagacagaataaccaactcctatcaattatcataacttatctaagcctaatatgtgaaaatagaaatcatattaaaagatacaatatatgtaaagtactaagaaatattagtctatcttttgcccacccctacccacaagcacatacctcttaaactctcacccttataaggctagaatgagcaacttcctaacactactcttttctttagattccaaatctccttttgcacagaggaagaagggagagttgccaaaactgccctgtgtgcatttgcatacggtgtttttgaccttgtgcttgtttagttggggagagaagttaccactggctgactctaatgggcaggaagatggagcttggcagcaggactgattctaaaccccgccccctgcccctgccattggctgcaaatccagatggtttctgagttctctgctatcttgtgtagctacctacaggaatttctagaagaacacacttgatcagtgcttactgctttggagaaccattgcatctcatttaggataccagttattctgaacatctgtagatttgttattttctacatattatttttataaccattgctcatttgctcctaacagtaaccctgtgaggtaaatattataaatatgcccgttttgcagatgagaaaactgaagttaagaaaggatagataaattacccaagctcctacagctagtaagtggcagagctgggccctgcattacatattgttattgtgcaagcaaatcaaaataattgattctttagaagatttttacatatgaactaattccagatgttagtagcatagctaattctatccattcaagtactgatggtaagactaaagtaatataaataggagttgtataatatgtggttatgtaatataaataacaagtatagttttatcagataacactgagcttttgttaaatcttcttttcatcattaattcaaggtaagtattattcagaaaatttagctcaacccatttctactttgggaattattaaagaataaattctgattcactataggacttcctttcatctgactctgtagtaataggcctacagtcataccgttgagcttgcaggtttcactttgcaaaagtttttaactatctcaaagctaaaacatcaacactgaaagataaagatgcagaagtgaatgtccagtcatctgacttgctcactatggtaattattgccagactcttagcaagtaaaaagagtatatcttgcctcttaactatacattgtgtttatatgtgggtaaaaaggtttttttaaaaaataatagcacgtgtaatatctgaaaagagtttcagcaacagcttccaatatgttcttaatatttataaaaatacctaattaccttgcattttgattaaaaaaaaaagggrgggggggctctaaaattagactatcctattcttaacttttctgactacatgacctggagcaaatagcttctctttctgagatgtgatttttcaactataataataaactctggagaatagatagcaagttccttgaaggccaggactatgaattatttagggcctaaaatagttcatggcactcaaccaataagtattgaattaaataatgtgagaagaaagaacatggtgtattaggagaaaaatcatgtaaattagaaggcacagatcactttttttttttctataggttgtgaatgcagaaccaaataatttattgttgcctttagaggaaggttctcttgatctgagtgttacttccttttatttcaataaataggttttgagtttcctgtatgcactggataccgctctggccactgggtggagacgtagatgaataagaccccacctctgccatcccaagactttctttttggtacacaccacacacatacatatacacacagctatagcataaggcaaaaaagtttagcaaaacatgaatagagtcttaayaggtattcaaatgggcgggagagcctactccatgtgagagcaattaagaaagggtccgaagaaaaggtagcattttagctaactctgtgaggagtaagtgcactttaacacttagaaaacagcaggagcaaaagtaaacgaatagagggtatctggtgaccagcgagtattccattcaatgggcacacacaatggggcagtggtaaggttgtaaacatagcttgaggcccagtaacagagggcattaagtattcctttaaaatttttgaagaggctcttctttgggtactggggagcccttcaaggttattggatggaggagtgacaggctgtgtttgtaaataaagaggttgactcttgctgggaggatggatggtggggacttgggagggactggagtagggagacacctagggaaggacggtgggatgactcaggggagaaatcatagagcctacatcctaggaattgaagggagcccacagatggcaatggcatgtaggggagactgttaaaaatgtcattcatgaacatgtgggggaccctsaatagaattggtagagaaggggtaaaaggcgaatggtgcaaagtaactgcccactaggaggacagtggaagggaaataaacttggcagagtccagaccggaaattaaaattgtatgtatgcttttaaatctatcctctagcaggcatctcaccaacacctcactccaacacatttgccttacctggtaaatcaagtctgcagcattaagtaattgctaygtgttatcagaaatcaatggcagtttatacatgatactggaataaccaccaaattaaactgaaaaccaacccaggtcagaataaaaaaaattgtcactaaagtaaactttttaaaattgaaactaattttagattgattgccaggttaaaaccagaaagctggctgtgataaatccacttctcccccaggactaaaattctttgtggatactggaaaataagtccttgtatttgcaaagcacttttgtaccttacccatttgataaataaagaggcagggtcagaggaaataagtgacctgtgtgcagtcacacagccagacactgttctttggaggtccatgaatatttatttagtatacagttccatttaatttgtgaaggtttacaagacgtctttcatgttcagcactgttctagggcctgggggaaaacaaggacgcctgagcctttgcccatgctcttggcaaacattaaatggtctggcaaacatttggatttcctttgaagttggcagtctcgatacatgatctattcttcttaggcagtcaacaaacttagtactgccatcccagctatgccactggctgtgtcatctgagacagaccagttactcctatgtaaagtgggacatgtaagagggttaaacttacctcattaagatgcgagctacacaagagtcatagcatgaaggctattgagtcaaatcaaaagtatacctctcaagaaaaacatccatgtgtagcccactctatctatctatctatctatctatctatctatctatctatctacctacctacttacctgtctgtctttctttctatctatctatctatctatctatctacctacctacctatctaccthcchgtctgtctgtctttctatctatctacctgcctacctacttacctacctagctagytagctatctttctatctatgacaaygcagtaagcaccatgaacctgccacctaatgtgaaagcatgagcaatgaaaggtatatcatgactaaggattatgatttttccctttctgtgcacttgaaatccctgtaagagaaaaagagaaaaataatttccatgactccagggctattggtatacataggcaacaatggggaagctatgagaaacatcttttatttgttagtrgtgataaccrtaatgcagtttccattcattcacagagttctgagaaatctgagtgacacaactacaaagtgagaacttttccaattactgtctcaaatttattacaagcacttgtcaatataagtgaaagcctatctcacttgaaaagaagtaaaaagtttgcagatatgccattcgccttttatgttttgacaacttcatgaacatttgtaaagattttactaacacgtcctgtttgaacactcttgatgtggtggtttttcctggaaggccctaagaagccaccattttgctctgtaattgacttgtgctcacctgcccaaagaattaataccataatgaatttggggcatgaggtaaatgtgaatgacaaacctggtcactccttattcatagagaaggattctgtgaacacctcccaagtctaatggctctaggtgaagtggagtctaagcccaaatgacagtcagaaaaagacagatatgaatctacgattgccaatggatggaatgattgctttgttgcaggtaaaagctccccatcacccagctcatcccatgagctgcctgaacttctgtgtttatgcccttcgcagtaataggcaaagctcacatttggcaaataaagaatttgactttgattagtattttttaaatgtgataacaatacaattgatgttttttgaagattacatataagccaggtgtttttgctaaatagaacaatttttctcattaaatcttcacaagaatcccatgaggtgaagaatatagggtccccttttaaagaaaataatatttctgggcacccatgcccccaagtgttgactaaatctttttataatgatgttacctaaatacataaaaaacacaaaattaggggcaaataccttatagctcttatatcatctatcatgttcaaataaatttacaaattaaacaccatatatgtaatagtggtatattgtaacaataaaattcaaaattacagcattaatgtgattagtgatactttagtaaaactaaatcttcttccacaatgtaatcgtggttgtggctgctgtgtggaaattttggagttgcacctgctgagtgctagggaagactcagttctctcaccactgtttctctacagtacaccccgctgcagaaccactgcaaaggccccatctgggtcttactccataccatttacccagcccctagtactgagactgacaccttggagtcattaaatgaataattatggacctcagttatactacagacaccctctgtggctgctctctctgcactgtgttttaagttcctgacccccacacttgatgggttttcttgcctagttgcacagtgctcagctgtactctcttggcactgtcagcagatagctgtatggagcagcccctcagtccagccccctcccacactgaatttgctattttaaatctacgagctgagaaaccccaggaacaaacttcttttttttatttatttatcgttaattctcatttttaccatttttaatttcatctcacatcatagtaagtacaaatatatacatatatatatgctaagactctgatgggtagattttgtgacttttctgtcaactgtgcagctctgcttctttgggatatataattcagacacttaaagttgctggttagaagatggccgaataggaacagctccagtctacagctcccagcatgagcaacacagaagacaaatcacttctgcatttccaactgaggtactgggttcatctcactggggattgtcggatagygggtgcagtgcaccgagcatgagccgaagcagggtgaggcatcgctgaagcagggtgaggcattgcctcacccgggaagcacaagaggtcagggaattccctttcccagccaagaaaaggggtgacagatggcacctggaaaatcaggtcactcccaccctaatactgcgcttttccaatggtcttagcaaacgtcacaccaggagattatatcccgsgcctggctyggagggttctacgcccrtggagcctcactctttgctagcacagcagtctgagatcaaactgcaaggtggcagcaaggctgggggaggggctccygccattgccaaggcttsagtaggtaaacaaagcagctgggaagctcaaactgggtggagcccaccacagctcaaggaggcctgcctgcctctgtagactccacctctgggggcagggcatagccaaacaaaaggcaccagaaacctctgcagacttaaatgttcctgtctgacagctttgaagagagtagtggttctcccagcatgcaccttgagatctgagaacagacagactgcctcctcaagtgggtccctgacccccgagtagcctaactgggagtcaccccccagtaagggcagactgacacctcacatggccgagtactcctctgagacaacactgccagaggaacgatcaggcagcaacatttgctgttcaccaatatccgctgttctgcagcctctgctgctgatacccaggcaaacagggtctggagtggacctccggcaaactccaacagacctgcagctgagggtactgactgttagaaggaaaactaacaaacagaaaggacatccacaccaaaaccccatctgtacgtcaccatcatcaaagaccaaaggtagataaaaccacaaagatggggaaaaaacagagcagaaaaactgaaaattctaagaatcagatcacctctcctcctccaaaggaacgcagctcctcaccagcaayggaacaaagctggacagagactgacttcgatgagttgasagaagaaggcttcagaagatcaaactactccgagctaaagaaggaagtttgaacccatggcaaagaagttaaaaaccttgaagaaagattagacgaatggctagctagaataaccaatgcagagargtccataaaggacctgacggagctgaaaaccacagcatgagaactacgtgacgaatgcacaagcctcagtagccaattcgatcaactagaagaaagggtatcagtgatggaagatcaaatgaatgaaatgaagcaagcagagtttagagaaaaaagaataaaaagaaatgcacaaagcctccaagaaatatgggactatgtgaaaagaccaaatctacatctgattggtgtacctgaaagtgacggggagaatggaaccaagttgaaaaacactctgcaggatattatccaggagaacttccccaatctagcaaggcaggccaacattcagattcaggaaatacagagaatgccacaaagatactccttgagaagagcaactccaagacacataattgtcagattcaccaaagttgtaatgaagaaaaaaatgttaagggcagccagagagaaaggtcaggttacccaaaagggaagcccatcagactaacagcggatctctcggcagaaactctacaagccagaagagagacgggcccaatattcaacattattaaagaaaagaattttcaacccagaatttcatatccagccaaactaagcttcataagtgaaggagaaataaaatactttacagacaagcaaatgctgagagattttgtcaccaccaggcctgccctacaagagctcctgaaggaagcactaaacatggaaatgaacaaccggtaccagccactgcaaaatcatgccaaattgtaaagaccgttgaggctaagaggaaactgcatcaactaacgagcaaaagaaccagctaacatcataatgacaggatcaaattcacacataacaatactaaccttaaatgtaaatgggctaaatgctccaattaaaaggcacagactggcaaattggataaacagtcaagacccaccagtgtgctgtattcaggaaacccatcttatgtgcagagacacacataggctcaaaataaagggatggaggaagatctaccaagcaagtggaaaacaaaaaaactaggggtttcaatcctagtctctgataaaacagacattaaaccaacaaagatcaaaacagacaaagaaggccattacataatggtaaagggatcaattcaacaagaagagctaactatcctaaatatatatgcacccaatacaggagcacccagattcataaagcaagtccttagagacctacaaagagacttacactcccacagaataataatggaagactttaacactccactgacaacattagacagatcaaagggacagaaaattaacaaggatatccaggaattgaactcagctctgcaccaagcagacctaatagacatctacagaactctccaccccaaatcaacagaatatacattcttttcagcaccacaccacacctattccaaaattgaccacacagttggaagtaaagcactcctcagcaaatgtaaaagaacagaaattataacaaactgtccctcagaccacagtgcaattaaactagaactcaggattaagaaactcactcaaaaatcgctcaactacatggaaactgaacaacctgctcctgaatgactactaggtacataacgaaatgaaggcagaaataaagatgttctttgaaaccaaccagaacaaagacacaacataccagaatctctgggacacattcaaagcagtgtgtagagggaaatttataccactaaatgcccacaacagaaagcaggaaagatctaaaattgacaccctaacatcacaattaaaagaactagagaagcaagagcaaacacattcaaaagttatcagaaggtgagaaataactaagatcagagcagaactgaaggaaatagagacacaaaaaacccttcaaaaaatcaatgaatccaggagcttgttttttgaaaagatcaacaaaatcgatagaccactagcaaaactaataagaaaagagagaagaatcaaatagacgcaataaaaaatgataaaggggatatcaccaccgatcccacagaaacacaaactaccatcagagaatactataaacacctctacgcaaatagactagaaaatctagaagaaatggataaattcctggacacatacaccctcccaagactaaaccaggaagaagttgaatctctaaatagacgaataacagaatctgatattgaggcaataattaatagcttaccaaccaaaaaaagtccaggaccagatggattcacagccgaattctaccagaggtacaaggaggagctggtaccattccttctgaaactattccaatcaatagaaaaagagggaatcctccctaactcattttatgaggccagcatcatcctgataccaaagctgggcagagacacaacaaaaaaagagaattttagaccaatatccctgatgaacatcgatgcaaaaatcctcaataaaatactagcaaaccgaatccagcagcacatcaaaaagcatatccacggtcaagtgggcttcatccctgggatgcaaggttggttcaacatacgcaaatcaataaacgtaatccagcatataaacagaaccaatgacaaaaaccacatgattgtctcaatagatgcagaaaaggcctttgacaaaattcaacaacccttcatgctaaaaactctcaataaattaggtattgatgggccgtatctcaaaataataagagctatctatgacaaactcacagccaatatcatactgaatgggcaaaaactggaagyattccctttgraaactggcrcaagacagggatgtcttctctcaccactcctattcaacatagtgttggaagttctggccagggcaatcaggcaggagaaggaaataaagggtattcaattaggaaaagaggaagtcaaattgtgcctgtttgcagatgacatgattgtatatctagaaaaccccatcgtctcagcccaaaatctccttaagctcataagcaacttcagcaaagtctcaggatacaaaatcaatgtacaaaaatcacaagcattcttatacaccaacaacagacaaacagagagccaaatcatgagtgaactcccattcacaattgcttcaaagagaataaaatacctaggaatccaacttacaggagatgtgaaggatttcttcaaggagaactacaaaccactgctcaatgaaataaaagaggatacagacaaatggaagaacattccatgctcacgggtaggaagaatcaatatcatgaaaatggccatactgcccaaggtaatttatagattcaatgccatccccatcaagctaccaatgactttcttcacagaattggaaaaaactactttaaagttcatatggaaccaaaaaagagcccgcattgccaagtcaatcctaagccaaaagaacaaagctggaggtatcacgctacctgacttcaaactatactacaaggctacagtaaccaaaacagcgtggtactggtatcaaaacagagatatagaccaatggaacagaacagagccctcagaaataatgccacatatctacaactatctgatctttgacaaacctgacaaaaacaagaaatggggaaaggattccctatttaataaatggtgctgagacaactggctagccatatgtagaaagctgaaactggatcccttccttacacctcatacaaaaatgaattcaagatggattaaagacttaaatgttagatctaaaaccataaaaaccctagaagaaaacctaggcaataccattcaggacataggcatgggcaaggacttcatgtgtaaaccactaaaagcaatagcaacaaaagccaaaattgacaaatgggatctaattaaactaaagagcttctgcacagcaaaagaaactaccatcagagtgaacaggcaacctacagaatgggagaaaatatttgcaatctacccatctgacaaaggactaatatccagaatctacaatgaactccaacaaatttacaagaataaaacaaacaaccccatcaacaagtaggtgaaggatatgaacagacacttctcaaaagaagacatttatgctaccaacagacacatgaaaaaatgctcatcatcactggccatcagagaactgcaaatcccacaatgagataccatctcacaccagttagaatggcgatgattaaaaagcaggaaacaacaggtgctggagaggatgtggagaaataggaacacttttacactgctggtgggactataaactggttcaaccattgtggaaagacagtgtggctattcctcagggatctagaactagaaataccatttgacccagccatcccattactgggtatatacccaaaggattataaatcatgctgctataaagatagatgcacaggtatgtttattgcvgcactattcacaatagcaaagacttggaaccaacccaaatgtccaacaatgatagactggattaagaaaatgtggcacatatacaccatggaatactatgcagccataaaaatgatgagttcatgtcctttgtagggacatggatgaagctggaaaccatcattctcagcaaactatcgcaaggacaaaaaaccaaacagctcacgttctcactcataggtgggaattgaaaaatgagaaaacatggacacaggaaagggaacatcacacaccagggcctgttgtggggtggggggaagggggagggatagcattaggagatatgcctaatgttaaatgacgagttaattggtccagcacaccaacaaggcacatgtatacatatgtaacaaacctgcacattgtgcacatgtaccctaaaacttaaagtataatataaataaataaataaataaaatgatgcaataattaaataaaaatacagtataaagttgctggttaaatgatgaaagaatagtttctgaactgcacatgtgatttctgtagaaaaatttgtattactcgtttattgcttatttcttgaacaggagtagatatttagaattactgtttgtaactaaggtgttcctcacaatccaagccagaactgcgtctcgaatgtatttcccaccatttctctgagctccagccctctccaaatcctactctttatcagtgcagcttctcaccattgctcagtcacacaggattgggggagagaagagggcagaaggggtggctttgcacctccccattgggcaggcctttcctctgcctgaactgtgctttgctagttctctacctaacaatttcctactcattctttaattcgctaaaatggtgcctttgagctgtctccagctgccccacccagcttcccctggctccctccgtggtgccctcacaaactgtttacaaatttccaacatagcaattattgcacactgtgagctcttccctttgtgttccctatgcttactatagccatgttgctgcctaagggacacacgtagggaaataagactcagcaacacatcccattcaacaacagccagcataagaaatggtaagcttttaagccaggtgcagtggctcctgcctgtagtcgcagctacttgggaggctgaggtgagagaattgcttgagcccaggggtttgagcctagcctgggcaacataatgagaccctggctctttaaaaaaaaaaaaaaaaaagtttgcttcttttacattccctcttcccagagagggaagctttttctaatttacacaggcactttttgctattggagggctgagtgtaatatttgacaaaaacaatcaatgcttatctaataataataaaaatacttatcatttattaaccatttaccatgctaacccctttcatgcgtggttccatttagcactataatagcctatgatggaggtaacagcaccccatttctctgaaatcttcacatagtggatattgctgtcaaataaattatcttctactagggtgagctccactgacatgagacttgagaatgagtagaccgtaaaaatgtcatttattagacacaattttccaggcaccgtactaagcactgcaagtgcatttactcataagtggaatgcaattgttatgtgaatggcatgtccaatcaaggtgcaaaaattcctccccaggcagaagaagcattgaaggaaaacaatagcatgttctctctggctttaaagtgacaattggtttacagtaacagactcacccggtgatcactagtgtctagtacagaaataagaatgaacctgctgggctatgaattcagcatagatagaaaaraatgtgtgtgtgtgtgtgtgtgtgtgtgtctgtgtgtgtgtgtttgagcaagtgagaggaagacagagagggttttttttttttttctcaaaacgtagtattggagggcagtttgcggtgttttatttccttgaagtgtgtttatgtatcttcatggcttttatctctaaaatcttggaggaatttaaatcctagccaagtgaggatatatacttttatcagctagtattccaagtttagcaagcaatgtttgctttttcccttccaaaaaaaaaaaaaaaaaaaaacggatggttcaraaacttttgagccactcacatgctctcacattgtaaatgtgattcactcctctgactggccctgcttgtcatagaaaacacagtctacttgcatttagcatctgaaagatacctcaaggaaatatttagatgggagacaccgtgagagctataccgaagagcctgagacagaaaacaaggggcctgtgttctcatcccacccttccactctcctactgcatgaccaaactccctagcgagagtcctaatccccgtgatgcatcctgctaaaacgggactacaggctaggagtctcagctgtaatggatttgcctctatttgcaagttccccctcttttcattgaagtaggaagaagtgagaattattcartcagtcacaacattataatgaatgctgtttattattgcacttgatttgttggtttgccctcaatcactcctaggacatgaatgctgcaagtgacctcttackctctgagtctggagtgacatcagatggtggggggtaaagagcgcactgtcagctcctgaaactgagtcaacatccaagggggtaaagctgaataccctctcctatctgaaggagggagggagggagggagggaatgaggggaggtagaaagaaagaacatcttcctagtatagagtctgaatgctgtaaagaaccatcagggtcatctcacttaactccctgatggtcagaaaaggaagctgatgttcagggagcaaaagtgactttcctaagctcacatagataaggaggacccaggccagggccaggaatcttgcctctgatttgcaccacatttatagcttaaatatttgcctattggccttcactagacattaagccccacaagcaaagtatcttgtgtgtgttagttcacagctatattccgtcccctagtgtgagcctccatactacgcgctcaagaaataactgatgaatgaagagatgaaccaaaacttacgcccaggtctcacatctctcagccctttcagcttgcactttctcccaagacatctctgatatgccttgtgagtttttaacagtatattaagggggagttgtatcaaaagtagaaactgttccaaataaatctattcaacctggatgttctttgtctataacccattacttacaacatacactaactcacaaggtatatttcttgattcagtcttgaaatgcgagcaaggttaatttgacttagacaaaagaaatggcttgagagatggagtaccataagagatggggtaccataagtctgagagatggagtaccatgagtagtcaaaaaggaaaaaagcactgtgaattttgtcttctgaagtaggcacgtagctactgcatttctgaaagtaacttgtgatagaggaaggaaaatatgctctgtaggtggagagatttgggttccagttaggactttcctgttttctagatttgtgaccttgaacaagttaccactgagcctcattacaagtggtgatgataatgtgaagtaggcattattattaaattcatgatgcagatgaagaaaatgaatcctaaaaaagttaaataactagtccaaggtcagatggccagtgatttgaatcaaacttattagcaaggactctcaaaaagaaaatgtgtctaatagagaagcagtgtgcctggcccgtctgacaccaggattggactcttgtccctgccttgtgcactttccttacttaacaaatgcctgggagcatataaccacactggcctcaccccgtaacatcacgtgactacatttgaacaaactatattatgaaacagtcattgagctctcccttcctgcctgtaataggtcacagcatctgttcctctactgcagacaacagctattaaccaattcttccgtcagccaacattgcttaggcaattaactactgtgtactcagcaactgctaagccctggaagaatccaaaccgaaaacaaaacagtagtgaagtttggtctttggagtccgagacagctgagtttgaatcccagttctgccacttgccggctgggcaaaattatgttatctctctaagcctcagttttctcatttgtattgtagatttatatagaaaaaggtatttgtgttgtgtttgtgtgtgtgtgtttgcctgtatgtgtatatgtcatagtgttatggggaggattcaatgagataattagtgcaaaatgtttaagaaggtatgttgtgacaatggcacagaggagagctcaataagtattagttgctagtattaagaatgtatattctggccaggcatggtggctcacgcctgtaatcccagcactttgggaggccaaggcaggtggatcatgaggtcaggagatcgagaccatcctggctaactggtgaaaccccatctctactaaaaaaaaaaaaaaaaaaaaaattagccaggcgtggtggtgtgcacctgtagtcccagctactcgggaggctgaggcagaagaatggcgtgaacccgggaggcagagtttgcagtgagttgagatcgtgccactgcactccaacctgggcttgacacactgtctcaaaaaaaaaaaaaaagatgtatattctaaatgggaaaaagacacaatttgagttatcaaagaacagttgtgacggttaatactgagtatcaacttgattggatggaaggatgcaaagtattgatcctggatgtgtctgtgagggtgttgccaaaggagattagcatttgagtcagtgggctgggaaaggcagacccacccttaatctgggtgggtaccatctaatcagctaccagcatggctagtatataaagcagtcataaaaatgtgaaaagactagactggcctaacctcccagactacatctttctcccctgctggatgctttctgcccttaaacatctgactccatgttctttagttttgagactcggattggctgtctttcctcctcagcttgcagatggccttttgtgggaccttgtgatcttgtgagttaatacttgttaaactcatatatacatatatatatatatatatatatatatatatatatatatatataataaaaatatatatgtaaatataaataaaaaacaatatcgcatccctggagggattatggagattagtgccaccatcaaggacttaaaagatgcaggggtggtgattcccaccacatccccatttaactcttttatttatttatatatatctatatatcctatagatatctatatagatatctataggatatatatacttaggatatatatctttaggatatttaggatatatatatggatatatatatagaggatatatatgtgtatatatatggatatatatatatagggtatatatatgtgtatatatatacagatatatatataggatatatgtatgtgtgtatatatatatatatcctatttgttctgtccctctagagaaccctaatacagattttggtaccaggagtggttctaaaggaacagaatattaaggatggagttctttcattagttttgggggtttttggaattggcttcttagtatgattagacccaaaaatgctaaggaccctacttctagtagcatggagaacactgatagtccttggcatgaactgtttagagagttatgcaaaataaatgcatttgacattcctgattcaccatttgtgagaggcaaggagtttattgactctatacataatacttttgaccatatgtggagaaccaaggaacataatgaagctgcttggttgctcctaagttcagtagacaaagtgatgaaagaaaaggatgaacccagggattctaactcccagcttcagaggcagacactgagcctcagattgctaagattgccctgagtgagagtctcatctcctatgtgaaagatgaaattgtggaaaaacaggcacaaactcttatcatgcgagtggctgacctgcaatgaaaggtgcatgcacagtctcatcagatgtctatggttaaagtgagggcattgattggaaaagaatgggaccctgcaacttacaatagaaacgtgtgagagaaccctgataaagctggggacactaagtttgtaaattctgatgaacctttttttgccagaagaaacagcttccccatccccagtagtgtcaacatcccctcccaacccatgctgccatcagcctttccacatttgtctgaggagataaaccctgtgctgcctgaggcaaatgtgatggcctcccctgaggcaggtgccaggcaagataatgttgattctcctcaggagccacctccaacacccctatttgcgtytagacctataactagactaaacttctggctggtgcctagagggaggttgagagtgtgacccatgaggaggtgcactacactcaaaaatcaatgctttgaatataaacataaatctggagaacaggcatggaaatggatattaaaggtgtgagataatggtggaaggaacatagagttggatcaggctgaatttattgatttgggcccactagggactctgcatttaatgttgcagctcagggacttagaaaaggttctagtagtttgtttgcttgtttagctgaaatatggattaaaagatggcccactgtgagcgagctggaaattctaggaccaagtttagtggaaactgaacgtttgactacgggtcatccagttgccatgagacctgaactgccaatcatgaactaagtgctttctgacccatctagccatagagtrggccgtgcacagcagcattccatcagcaaatggaagtggtatatacatgattggtctcaagtaggtcctgaaggcacaagtaagttacatgatgaagtggctcaaatgtccatggtctccactcctgccaccctgcaccaatggcctcatggggagttccctatgatcagtagacagaggaagagaagactgggtcctggttcacagatgattctgcacgatatccagataccacccaaaagtggacagctgcagcactacagcccctttctaggacatccctgaaggacagccatgaagggaaatcttcccagtgggcagaacttagagcagtgcacctggttttgcgctttgcatggaaggagaaatggccagatgtgcaattatatactgattcatgggctgtagccagtggtttggctggatggtcagggacttggaagaagcatgattggaaaattggtgacaaagaaatttggggaagaggtatatggatggacctctctgagaggtaaaaaaacatgaagatatttgtatcccatgtgagtcctcaccaatgggygacctcagcagaggaggattttaataatcaagtatataggatgacctgttctgtggacgccactcagtctttttccccagccacccctgtcatcgcccaatgggcccatgaacaacgtggccatggtggcagggatggagattatgcatgggctcagcaacatgggcttccactcaccagggatgacctggctacagccactgctgagtgccccatttgccagcagcagagaccaacactgagccctcaatatggcaccattcctcagggtgatcagccagctacctggtggcaggttatatatatattgcacctcttccatcacggaaagagcagaggtttgtcctcactggaatagacacttactctggatatgggtatgcctgtcctgcacacaatgcttctgccaagactaccatctgtggactcatgaagtgccttatccactgtcatggtacacacattgttacacacaccccacacagcattgcctctgaccaaggcactcactttatggctaaagaagtgtggcagtgggctcgctcatggaattcactggtcttactatgttccccatcatcctgaarcaactggattgatagaatggtgaaatagctttgtaagtcacaattacaactccaactaagtgacaatactttgcagggctggggcaaagttctccagaaggccacgtatgctctgaatcagcaactaatatatggtactgtttctcccatagccaggattcacgggtccaggaatcaacgggtggaagtggaagcggcaccactcaccatcactcctagtgatccactagcaaattttttgcttcctcctcccacaacattacattctgctggcctagatagtctgctggcctaggtagtcttagttccagagggaggaatgctgccaccaggagacacaacgattctgttaaatgggaagttaagattgccacctggacactttgggctcctcctacttttaagtcagcaggctaaaaaggaagttacagtgttggctggggtgactgacccagactgtcaagatgaaatcagtctactacttcataatggaggtaaggaagagtatgcatggaatacaggagattcrttagggtgtctcttagtattactgtgccctgtgattaaggtcagtgggaaactacaataacccaatccaggaagggatagcccaggccctttaggaatcaaggtttaggtcactctaccaggaaaaaaaccatgacctgctgaggtgcttgctgaaggcaaagggaatactgaatgggtagtagaagaagtcatcaataccagctatgaccacatgaccagctgcagaaactaggagtgtaattgtcataaggatttcctccttcttttgttaaaaacatgtttgtgcatgtaacctgtactaagaaaatatcttcattttatttcctttttcctttatcatgtgacataagatttattgacctcacatmagcatagaagtattgttaactttaatagtatttgggttggagattggtgcatttctggttgtacgaaggatagttgtattatgttaggtgtaattatgaccttattattgtctttatttgaagattatatataatctcagaagatgtgtatgggttcaagttgacaaggggtagacttgtgatggttaatactgagtgtcaacttgattgggtggaaggatgcaaactattgatcctagatgtatctgtgagggtgttgccaaaggagattaacatttgagtcagtgggctgggaaaggcagacccacccttaatctgtgtgggtaccatctaaccagctgccagcatggctagaatataaagcagacagaaaaatgtgaaaagactagactggtctagcctcccagcccacatccttctcccatgctggatgcttcctacccttgaacatcggactccaggttcttcagttttgggacttggactggctctcctttctcttcagcttgcagatgccttattgtgagaccttgtgatcttgtaagttaatacttaataatatatgtgtgtgtgtgtataaatatatatatcctattagatctatctatctatatatatatatatatatatatatatatatatatatatatatatatataaatgggtgtgtgtgtgtatatatataaatatatatatcctaattagttctgtcactccagagaactctgaccaatacaacagtcaagagctctgcttaattccttttgctggtagaataacctccctatcttgctccctattstacttggtgaataatggtctatttaatatttagctcacatgtcccctcttgcttgcctatcctcccctccatagcagaacttatcctgccttcttcatgccccttgagtactttgcgtgcactgtcacattgccttagtaacttagaaatctctgtcattaaattgtgaggttttttagagcttattgtagccccagttcctagcacagtgcctggattattcatgtgctcaaaatatattaggtacatgcataaatggatgtaactatctgataattatttcctaattatctacagtaattaggaaagccttctaacaagagaaagttcatgagaaatgagtaacttcagaagtactggggagacagcaatggaaacagaaaaagaatggggatcctgtaactttaaattggtgtaatcaacgtatggatctcagtgagggtaatttccttacacaggtaagggtaaatcagcttataggttttggccagccccatggagtcacataacctttaggataggtatgtaagaccagccagtaaagactagtctgagagattaccagaagaggagaggagcccttagggaagctacagaagaagtggcattcctgggagtgaagaaatgaaattgaggcaagacatgctccctgcaaatgagcatattacttcatacccatcaaaagtattcagtggtgtcatagcccttggggattgatcaccaaaatctcattgcttgaatcacttgaaaaaaatagagrttatattttagaaataaggtataaaattttataggaagtaatttgcctggagaagttctcagcagtagttattgtggctatccactgagagcagagtaraatgcacacttggaatctttgcaagcaatcacagaaaaggtagtatcgtataatagataagagcgcaactctggagccaaactgcttgggtatgaatcttggcttgtgactcctagttgtgtaaacccttaggcaagtgactcaacctttctctagctcagtttccttatgtataagttgtgaacactatttgtagccacttaataggacttggtatgtggaaagcacttagaatgattaatccatgtaaagcacttataaaagtatccgctatatgagtaagcatttaacaaatgttaccaacaaatgctattattattgacaagtactttttatctatttggttccacacattattctggggtaccttgaagagtgcaaaagaaaattttaagataagatcctcctccttacagggttaagctgaagatgaaacraaaaactagcatcaatagagcaattagagaacccttaagtccaaactgagtaactgtggttaaaggaaggaaaggatcaggatagtcagagaaggggcctaatgtggtgatatgtacttagtgggtgctcaattaaattcattaaagataacccagacagaattttcactcacattaggattttattaactgttatgtcagtctctggatttggggggaaacaatcacaggaacaaaataataccctcaattagcaatgcatttagagaatgctaaaatagaaaagggaaaaaaggaatttatcttttagcttgaccttgaatgaggtttcaggatttgagaatggtagagatgaaagaaacctcagagatcctcagcgatcaactggtctatgcactgtcttttatatatgaagaaacaggcccagatatatgaatgacttgttcaaattgcactggagaaccaggtctcctcattctcagtctgattcttggctccctgtggacattggtgggcttcactggattctgaaagccattctccctgcccaacactgatcagttagtcggacttccatctatggaccctagagcttttcctgccagtggttgctcctgtaacctactgtggccattgtgggctgacagccatattgtgagggattaggtagctctctaggcattgacaagaacctttgaattttagaaaatatccaaaaaaaaaaaaaaagaaaagaaaaacagaaaaaaatagaaatcaagaaattagcaatgtgaccaacaacgtatgttctgagccccatttctctatctaacatatgggaatttaaaaataatttcaacatgtccaattggtgagaataactgtaaagtgagcaaagtagggaataaaggttttttcttctttacttagttttgttttgctttctgaccctttgagttgtagtataagccatagtattttgaaacttaatgatgaaatcctatacaattttaggcttatgaaataattaataggagtcacaaagctggcaatttcctgtggaatctaccacacagaatgatgcacaaattggcaaagaaaatgacactttcagaatctattattaaattttatcatctcttgcactagttccaaacatgaatatctaaatgaagataaaattgctaagggctcagtggaagccttgacacatagtgggacatacaggcattcaataaataaatttattaataaaggaataataattataacttaattagtaaataaaataaataaataaatgaacraataacccccctagctgacagtagcataaaagctccatcagctttaatgaacctgaagaaagctgtttcagttttttccaaaaactggacctatgacccagtgaccacacaaagtttgatgtttgcaaggcaggatggatgttggaagaaatgtagccgtggtggataatacagtgcaacaacatcatctttgggatttgattctctgatacttctctcatattcccaatttaaggtcatgttcatatccatgctggaatactttgaatcctagcaaataaattaatactaaacctagtctgccaaagccctgtgttcagaatgacggcaccttgttagaaggcttgcctaattactctaggatcctccgtcctagatacttacatccatttattcatgcaccaaatatatactgaacacatgcataatccaggcattgtgctaggaactggagctacaatactaaagaacctcacaattcaatgacagagatttctaagttactaaggcaatgtgacagtgcatgcaaagtaccgaaggggcatgaggaaggcaggataagttctgctatggaggggagtatatgcaagcaagaggggacatgtgagctaaatattaaagaatagatcattattcaccaagtagaatagggagcaagatagggaggttattttaccagcaaaaggaattaagcagagctcttgactgtcgtattagtcagagttctctggagggacagaactgatatatatatatatatatatatatatatatatatatatatatatatctcctattagtggaggaaatatatatatcctattagaggaaatatatatatgatattatatatataatatatatatatgggagtttattatgtattaactcacaagatcacaagataccccaataggcagtctgcaagctgaggagcaaggagagccagtccgagtcccaaacagaagaactttgagtctgatgttcgagggcaggaagacttaccttataaggaggcaatacggagagtgtagagggtgttgaaagggaaaaaaaaagcaatcatgatacattcttgggaccagttattaattacgaataaatggttgctggtggaaatgtcaattmgtacagattatttgaaagcaatttggcagtgtgtcaaaacttttaaactattcataatttttaactcaataatttaacctttagaaatctatcccaagaaaataatccaaaatgcactgaatggtatattcattgcaatatagactacaaagaaaatggaaaacaacaaacaacataggaatgttaagccactgcagtaaattcacttgaaatactattttgtcattatgtttataagacaccttggtttgtagtcttcttttctcgtgatatctttgtcaaattttggtatctaggtaatactggcctcatagaataagttgggaaatgtctcctcttctatcttttagaaaactttgtgagaattggctttcattcttttttaaatggtgtttartagaattcaccaggaaagccatctaggcatgggcttctgtgtggataattttttaaatcactgattcaatctctttacttgttataggtctattctgcgttttaattttttcttgattcaattttggtagtttgtgtctttctaggaattagtccatcttatctaagttagctaatttactggcatataattgttcatagtattcccttttaaatcttatttgtgtaaggtcaataataatatctcttcttttattcctaatgtttgcaatgtaaatctttgttttcttggtcagtctagctaaggttaatcaatttcatcaatctttgcaaaaaaaaamaaagatttttcttccccactttgttttgttaatttttctcaatttttaaaattctctgtttcattaatttctgttctaatatttattattgttttttttttttctccttgctttaggtttagtttggtcttacttttccagtatcttcaggtagaagattagattattcctttggatctttttttagtatagacatatatggctataagtttttctctaagtacagtgttagctacatcctataaattttggtatcttgtgtcttcattctcattcatctaaaagtagtttcattttctcttgtgatttcttctttgatccattggttagttaggagagtgttgcttaatttccatacatttgagaattttccaaattcctttatgttactgagttttaatttcatttcattgttatatgttcattaaaactgatgcttctaaagattttctaataattgggaaagtgtgtctattactattaaaattggcttctatttattgaactatagtgtcagcaactatggtgagagctattaatatgttatcacatttaaatacctaaaactgaggctcagagattaaataatatttctaaagtcatacagccaaattccaaagtctatgcccataacacttcattatgtgaaatagtaaacttaaaaatcggaattaaaattatacagaaaagtatagtacaactaaatttaaacaggatacatttttttaaaatgaagaaataatactaagggatatttgtatctctgtaataagatgataactttttcctcaattccctttgaattttttctaaaaagggaagcttccatttgttaatggaaaaaagttgttgttgttttttttttaataaattaagcttttagttaggaaagggagtaaaggttaattgggaaaaaagttagaaaagaaaaattaaatggtagattttattggagttattaatgctactggaaatctttaaaagttttccattattgaattgtggacaatagatagagctgaaaatgtgacactatgaaaaaatgcatacaagcaaatagctaagccacctcatttttattactagtaataaaaggcagctagaagtaaatgagatcattgagcataagaattatgagattaaattcatgaaaaaaagacaaatctgagataactgcagagaaatgcaataaaaagaaactatgtgggttttgttttgttttttgttttttgttttttgtttttgagacgaagtctctctgtgttgcccaggctggagtgcaatggtgtgatctcggctcaccgcatcctctgcctctcaggttcaagcaattctcctgtctcagcctcctgagtagatgggactacaggcacatgccaccacacccagctaatttttgtatttttcggggttttgccatattgatcaggctggtgtcgaattcctgagctcaggtgatccacctaccttggcctcccaaagtgctgggattacaggcgtgagccaccacgcccagccggtatggttcttattcttccattacttctcccccctttcaccagatgttcagttattttgttgtgtttgttttgttttgctttgcccacattttctctccatactcatagtagaaatcattgctcaacattttggttcctgcattcattcagtgagtattgagtacctgtcatgctctmaatcccagagataccaaaatgaaagtaacatgttacctgctattagatcataatgtgataggagagaaatatataaaaataagtggcattcactgtgacaacattgggtagaacacctaagcataaccttaaaaatgctaagtgtttgtgagatggacaaagagaaaagagtttctaaaaccacctcctgagacaagatatagaagattaatctatacatatttaggagactagcatgggctggaaatacagttttgggaggtgtcatggttacaaccatgataatatatggattagacatccttcctaactcttccactgatttgatttctaccaccatagcttagttttgcctgttcttggacttacagtcattggaattatctatctgtattcttttgtgtctgccttctataatgcttttatggttcatccatgttgtttcctgcatcaatagttcagtcctttttattgttgagtagcatttcactgtatgaatataccgcaatgtattaatttacctgttgatggatattagggtagtttccagtttgaggtaattgtgaacagtcttgtaaagatacctttttgtggacatatgtttttctgttaggtaattttctaggagtgaatttctaagtcatacattagttatatgattacatttacaagaagataccaaactatttttcaaagtaactgtatcatgttgcattyccaccaatttaaatgagagttgcaagggctccatgtcttattaacacttaatattgtcagtctttaattttagctactctggtgggtatcaagtgaactttggctttaatttgcatctccccgatgactaatgatgtttttcatatgctttctgatcacttatatatatatatatatatcttatgttaaatatccagtcaagtctctagctcattttttattggtttttctatttatttttcaattgtaggactttaaaaatactttgaataaaaacttttcagatatatatattgcaaacattgtttcccactttgtgacttgtcttttcattttttaaatgacttcttttgaagaacagaaatttttaacttgggctgaagtccagtttaacaacttttttatttatcatttgtgctttttacattctatccataaatctttgcctacctcaaattataagtatattgtatgttttcttctagaaattgtacagtttaagcctgtgtgtttagatctgtaatctatcccttaataattttggtgtttggtatgaattgagtcaaagtttattctttcccaagttgctccagagcatttgttgaagcagttttagctatgggacatccaggtgggcatgagtgagaggttggacttatgagagtgaggttcaggaaagcagcctaagctgaaaatattgttttggggagagccatagttattataactatgttaataaatgggtacgacaatttctaacctcaccaatcttcctctttaatagcagcagacagagaataatatgtcataagtactatggtatgggtaaaaacaggtatatagagttctgtgacaacttagagaaggatactaactcaacttcaagttgagaaaatgagatgacccttaagctcagttttgaagatagagtacttcagcaggataaacatgaggtggagtggaagggcagtccaaaattagattgtttttgtcaattacaattctgaagtagataaacaaaagcatggcaagcactcactgtattctctgcttgatgtctcaggtttttctgataatagcatgtcattctttggagaatacctctccctatacctcccccactccaacagacacacacatctaccacggcgaagtaatttttatgtccacatagaccctgccmactgccaccactgtcataattagatgacacagagctgaacatctaatccgttctgagcacatcagagatcttccctgagattttttagcttgaacccaaagagtgctagagtcactcactggtttagaaactataagaaagggagcttaggattcagtggtagctgtgtttgccaccatgtaaaagggtctgatcagtagggagagaaaaataaagcaaacaaacactccaggagatagagtgagtgtcctgattgcatttgaatcttctattctagttcttcatgtggtttagctgcatgtggcctatctcatttggttgttctacagttcctcagatttgatgagattttctagtatccttgcaataaaattccttttctttatggtagtacagggctgccacatagtctgtgccctgctcaacttcaggagacatccttttcaaacataggcactggtaggcagggagctccacctagaagcctttagagttctcacctcatcactaagggctaaggatggtgaactgggtgtctctgcagtctggggcaaggttgacaggaatcatttgttttaactaaaaaatccatacaaatttgaggatattgtgtaaaaaaaaaaaaaaagaaataggcagttcaacctaaaaaacagccataaacatggtagttgttccttcatcttgtgggacgtagagtcagtcactgtttctgaaatagcctcaggtaagtacctaagagcccggcagaggagtaatttgagaatagagctaggacagctcctgcatcctgggatggtggtggagctggcataaactaaatttgcgggtttacaagaaataatctagtgtgccatttagttgagtgtttctggttaatatgaaacttctattcaatactgtttttaaaaatggtaattatcagtacaattcattttggttagtctataaataattaggacttaaagtgaaactcaratagcagttttatttgcttcagctctgagttcctgtaatacctgccagagcagcttgatgatgtgacaggtctttaatccacagcggccaggtggcaggagccacagtaggcagactctaatgaggcaagatcaggtctctttagttcataaaaccagacaaggatttatggtagacagtcataggaaacatggggtttgagtacacagaaacattctgctttgataccttggctttattgcttaacactggaaaacatcacattctctttagattgaatattatttgttcagcttctccaggtcctagttgacagttctattattgttaaagtccctccctaagaacagctccayacatgatgaataattggtcaacttgaaaatcctcccacttttttacaaataagccagtttctgcattgatcattgatttgtttattcactagcagactttctgccaggtactaggttagggagatattgaaaataatcagtaaatgaagtaaaaataagcactttacttaaggagccagtctacagtttagtagaagacagtcaagtaaaagataaaaaatagagagcaataaaggccagaatgtggggaaacacaaaaggagttggagcatgtattcattcaacaaatatttattgagtatatactatatgtacatgttctaaggcaccagagagatggcagtggatgaaaacacatttcttattttcagggagtttacatttccatggggaaaacagaaaataaacaaatgtgtatgyaggcagatggtgataaatgttgaaagagagagaaaggaaggaaggaaggaaggaaggaaggaaagaaagaaaagacaaaggaaggcaaatagtaatagggccagcacaattttagacaggcctgtcagaaaaagcctcactgataagggggaatatgtgagtagaactctgaacgatgtgaggaatcagccttctaagggaagaagattacaagcagagggaacagcaagagcaaagtccctgaatcaagattcaaggaaatcttgaatttaaggattcaaggaaaagcaacaaggccaatgtggcaggargacagtgaggcaaagaaggcacagtggcagaggagatcaaagtggtagctagagctggattatggasagcctttccagccatgttgtacattttgggttttattctgaatgaggtgggaagtcactggaggatctcgagcagaatgacatgatctgaattacaattttaaatgatcaccctggctgctgtaaggagaataaagtgcagcaggaataggtggaagcaggaacaccagctgaggtcaatatcatgctccaggcaagagatggtggtgacttggactggggtagtagtggtggagatggtgagaggtggtcagattatgggtgtattttaaagctgagaacacaggatttattaaccaattggatgtggggtatgagagaaagagaggcgtccctgcaagtttgcagcctgsgtaattggaagagttagaatttcccaagttgaacaagactgagggaggaccaaggtttttgtytgcttgcttggtgtttatttgcttgttgagggtttgtggagaagaccacgtgtttggtttgaagactatgtattagatatctaagtaaagatagtgagtaggcaattaattggatatatgagtctggaactctgggaaagtttcaagctggagacagggaaggctcctagctggggagggagggagaggagactcaaaaactgagtccaaatacccccaatttttaaagaccagaaagatgaagagggatccagcaaaacagactgaggacaaatgctatatggggtaggatgacaatgaaaatgtggaggtgtaccagagttcaaggaagcaagcgtttcaggaagaaagatatgatgaactatgtctaatgggaagatcaacagagtaagatgagacctgagaatcaacatttgattgggcaacatgaagttcattggtggccctgaataaagtggtttagataagtagccaggaaactttttctgtaacgggccagagagtaaatattttaggctttgcaggccatctgatctttgctgcaaatactcaattctgctgctgtagcactagtcataggtagtacctacggaatgagcatggttatccttgaataaaaccttatttacagaaacacatagtgggctggattggttcatgggccacaggtcactgacctctggtgtagatgatgttacgatatttgaagtgtgattgaagtaadttcagaagggaagagaagaagggataactttggaggagttttgctgtaaggagaagcagaaagatctgagtggtggctggagaagggtgcaagatgagagagragagaaggtctctatttccttgggagaaataagtatgacatctcagacaaagtgatgctgtagatgtcttgggcctcaacgttaaggaaaacatcctacttactatatgcattagagtcatcgtaaaatccagcatataatttcagctactccttagctatactgggcttggtctctatgccctttggttacctgagctttttactggaattgagcctccccaacttagactgctgactgagtgatgtgcttttatttagcatgatcagtcttagaaataacataaatgggggaaaaataaaacaggtttcatctgggattccatttcacasaacttaattagaatgattggcatcttgtgattttgatttcttcctaagcaaagaactctaaattgaatttcattttttgagatcaaaagaggattagctcccacagtttcataaataatgaacccagttctcagccttcactaggctacaagtgatagtcgttgggatttgatttttccctacttttctgatctgcttctttttcttatttctaggtacargtagccccttgtgcttcatgcgagttggaattgtttttattcctggtgttagatttgaagtagtaacaaaaaaaaaaaaacagaaaaaaaactataaaaaggaaacaaacatttttcctgctattagctacttttattaagtatttttaaggcattgcattaagtgctttacaattcatcttttttcttatccttattatgaaaatttttaaacatataaaaagtagaaaaagtagaattatgaatatattttacctgttactaagcttcaacaattaccaactcatgttggtataatccgctgaattgagagaaagttgtagaaaatatgactttttatttttctgactcaggactacacattgcattctgttggtcctatttccttatctcctttaatctagaatgattccttagtttttatggttttcatgacattgacatattttatagttttcatgacattgacatatttggcagaaatactacagaagtgatgttgtgtacttctcagtgttttccatcaggaggcccatggtgtcatgttgtcccacaatttggcgatgctaattttgatcacttgattaaggtgatatttaccagatttctccactataaaggtatcttttcccctctttttaataattaaataatctgggaagagataaatatcctattccccaacaaactttcaaccaatgctttargcatccacagatgattcttccctaacttgactattatagtgatgattacaaaatggtgatttcctgactttatccttccttctataattattagtcatactctaaagaagagcttttcttttatcccatttttagttacatcatttatgtatttttggtaatcagagtgaactcaaatttttttaattgaatgtgttatactttattactgtcgttattcattttaatattcaaattatccaggttttgtttgtgtcttttcatatgctaccattcattttaggttttgtttatttgttttgtgtttggtgtcatgtttatatttaatactgcttactttctagccccacgaaatgtttcagactcaccttatactttctctgctccagccttggaatgagccatttctctaaaacattctaggttcttttgtggaaaatggcatccagaagacaaaatctgagtagtgaatgtgcattttgctgttagggtttcattacatctaagctcctttaatggatagagaagaaataaaactttttagaaaatcctaagtttatatctcatgcctctaattactggtcaccatcttaagagtcttcctctccttcctccgtaccacgtttgtatctcacctttctttcacagtgacaaccctggttcccaacaacatccatgtgtttactcatttactcaaccctacagcacacaccaaatggtttcagaattgtcatccctgtatcacaaccagcaataaacctgttaagtgaagttcgaggcttctttacagatctaccttcacaatatactcagggggtacataagtactacatccctcccatattaatttgaagcaatccaatgcatcagattttttcagctcttaatattgcaatatggcatgaccataatgccgttattacacataaaaattgacaattagtggatcaacaagtatccagtattttttcagggccaaattggctcataagtatcacaratgggtttggttgttgtaattgttgctttgttttgttttataatttgtttgtttgaatcaagatcaaaatgaagtctatacattgtaactggttgatccttctcaaagtttcttctgatctatgtgttttcctgccattttttattggtttcttgcaattttatatagatgaaatcagatagtttgtcttgtagagcttcccacattttggattttgctgattgattgcatttttatagtaggaattaccatgtttctctgtcctctttgttgctgtaaactggtagttcaatccagaggtttggttagattctgattcatttgagggagttttgttttgggagtaaatagaggttttcaagactaccttgtaatattttattcttttatcagaagkcgtgaaacatctgactgtctctttgtgattgtagcagctactgatactcaatgcctacatccattagttcattaggtttgcagaagtaatctttttttaattaggcaatgttatagacacacatgtatacgtgcattcacatagacacatttctgtaagcagatatatctcaagccaactcttatctttcccttaacccctctttgttacattattacttgttcttttacctcacttgttttcaaagttctctttttatgtgtgtgaaaataagatttgtataatacaaagtagtggcccaaatrtacagtaacaactttcccaggggaacacaattattttagaggagaaacaaggagaggaaaatagcatgtataaaacaataagggggtcacagaaaagacgtatctgagctcagtataaatttaaacctaaattctgcccagagaacacctgtattactaagatgacattttagaactatgaaacttttttaaagcttgagaaataagaacaggaagatgaggagaaaaagtaaaacatgtccctagttttaaggttttctggatgagaaagataaaatatgtcaagattcactcatgtgtgtttaaaaacatgagatttgagtaggaaaataatttgagttttttgttttgtttccttctttcatgaagcatgtattttatcttaagccagttcaccaatgccattacatctcagagtcaggctgggcaatttcatgccatttgacctaacaacctggagacttctgagtaatagtgactcctagtatgggtgttctaatgtctgtcacaacatgaaaggtattcatttaacagagacaaaacaaaatcagataaacaaaagacatgtagatctaattgattgcragggttggaatgagtggtttactctcattcaattaaagataaaaattatttacaccaaataaaattagaaaccggctacaattgtttcttctcagtccatactatgagaytggggagagggtccttttttaaaaagaaatggctttattgagatataattcacatagtatacaattcactcacagtatacaactcaatgttttctagtatattcatagagttatgccaccatcactgcaatctaattgtataacaaacattttatctcccctaaaaaaaaccttggctgccacttcccaatctctgtgcccactatccccagctstaagcaaccacaatttacctttgtttccacagatttgccagttaatgggcaattaccttttaattgccgttcatggcctgtcacacttaaattctttccttttttacattatcataaaaagaaaaattgaagaaagtccaaaaaatatgaatgactatcacaaaaattgtaacaggataaccaaaatgatgttgttgaatccaatagcatctgatgatttaaataaataatcttcaagcatcaagctgtgggaagaacacactgtgatatcacttaagagagtcaagcactaataattttaaatataaacttgaagcaggcttaagttgcagaaacttgtcatgctcttaaaaacagtgatattttcaaccaggaatatttgcaaattcaatttctgacttctctgctcaccaattgtgtgactctggggcaagtaatagaagatttatacacttcagattcctcttctgtaatatgggaataatgatggtactaacttcatgaagttagcatggagattaactcatgtagagcttttggaaccaaatgtggcacataagtgctcaataaatgtkagttattgttttatcatctttaatagttagaactcaacattttaggtcaaattccaaaatagaattcttagatttgccagcttgccccatgccacatttgattggtattttcaaagtgtctatttaaagatgtttcctgctatgaaagcaatggatctagagctaagatactgtcactagagagacaaagaatatcattgatcaagtataattgagaatagggctgtaaatcagccatcagttgcttcagaacaatgtgttctacaaataatagcagaattgctaatttattattctcacctagcactcgtgtaacagattttcattttctatattaaaagaaaaaaaattacagcagcaaaaaagcttatataatggtattacacatgtctaataaaaaataaagaatactgttaaagcattataaaccacatatagtctctcttatagttgaaatgtttagctaagatcctaaacatgtgacttttaagtctgtgaatgtgaactgaaattgtgatttggtttttttgtccacaaatgtaaggaaatgtaaccaccaatacttccattcccttctctttaattccaatctgaaatggcttttgctaataagactgacatgttagatacttttattcttaaagtattagtgtgtattttctgttcttttgtaaagtgtgatgcttagtagtattatgtcccaatcagatgattcatgatacacaacattttcatacttgggaaatgttaacacattatagtccttgctttgaaacataaaagaattaatcacagataacacattttcatattcctttgacccttgagaccatttaaatgatgtggcttgcatgcagccccattttgggccctcaaagccttctgcattgtccctctctgtctacattttcaccccaggctttactcctcttggcattgttttgtatttgcatgaaaatgtgtaattttttttttttgcatgacaagtcattggtgatgttgaagttaaatgtctaacataccttgcagtatcacatgccattaattcttacatgattttttttcttttattttcagttactggagtttaaatatgcttgaaatgtaaaagtggcatgaaactggagtgatgcaagaatatttagtattcttttaaggactatcatttttaactaggaaaatttgggggcagttctcaaccttgtttttggacaccaaccctaaattacaattgatgataaaactatattgaacataggtgctgtcagcagagtaataaattctgaagtgatacctcttttccctctgagaatgtaattttagtacttgaatgtaaagtatatgtcccctaatttcagaaattattaattatttggttcattatttttcataaaaccttattaatgggcatacaattgagctctactactttgctgaaagtttctactacctaaaaaagtaatgaattacttaccgagtgacagcaccaacatttcagtactttaatgtttcctaaatgaacatggttaccaaaatggatatttgatatgggaatgtatgagtatacaaagaagataagttatttataccattttgtcaagcttcaaatccataagggcacaggactcattcccagcaatgggacaaaagcgcacatccaaacaggtgtcctttccttctaagggtcaccttgctgctctacatttattcttaacagcttccattgccaaaaatgtttttgaatacctgttttcaaattgccttcagagtctttggcaccttcatttcaatagccgtgtggtaacaaatcttgatccttggggagtgattttaattttttcagcagctgaaagaccctcagagccaaatcagccaaacaagggtagtagtcaatctgatgaaacatattttttaatgatatatgaatatgaaattagtaagacctgcatggccaataacttataaaatgactgtcaacacatttcccaaagagaaaccccacaaaacatttgcataagaacagcagcagtggaattaatggaatttccttagggagtcttctaggtaagcacatgatatccacttgaatgaataaattctaatgcctgtatcgtattatgtatctatgtgttatttttaattcagcctcatttaagctaatggaatagtttagttaaaatttttaaagacagtcattcttactttttttacctgatcagaatctagagtgactgccatttttcctttgataagttaagttaatatcaagttaatacccctttagcagcaattttaacagattttggttgattgcctcatggctgtcaccaactagctctgtgatagcagtataggacacaacttctctgtgcctctggctccctgtctataaaatgagggcttggggctaaattattgttaattattgttaaaaatctcttttgaataaaaatgttgtattctaatgattatatattcatgtgtcagtctgtaattataycataaatctacatacttctttgtgcagttttaatttaattaaaactaaacagaagtaactcaaattcaaattattttaaaagacatcaagacactaagaagaaaaccagtttctccaataaagcgttttctacctgatggtgataagacatttgtatagcactttatgtttacattgtcttttgtgagtctcacaacgtaagagctgctatcattgtcctcattttgcagatgaacatactgaggttcagagacattcaattccctttctaaggtgatgaactagcaagacgtagagccagcacaaaaaattcaaaaaattctgggtcttctccttctaatttaagactctttccctccatcaccatttatctgtaaccagtcttttgcttaggagacaatttttccaaggtgccaccattcagaatttatactccttgaaaataaaatcgacctttagaactctctggcaccactttagaattatccacttgcgtcactacagctctctgtgcttttacaaactagttgttttgtcagcatgagtgtgacaacaattagacgtcccctgtttttgccccatgccttttctccttcacagtcattcaatgacaagcgtaaaaagagcttcatcttttcacgaaaattcccattctacaagaacaaggagcagagtgagcaggaaaccagtgatcctgaacgtaagtagattctgaaagataatgtcacatgcaacataagagaaaaaaaattcacaggcaacacgcaggatgtaggctctcccacgccacacacctaggcaaacaacacagcaggcaggcagggcaggtctactactgtgaccagcgtctgactacagtctggatccctcctttcacatggctcttctttgcagaaggcattggagagagacttgccaaaactgggacttgcacccaaccaacatttatctttgaccaggactgggtccggtttgccttttctatcatgcaaccctctaagtcttgagacaaattattttctgagaagaaatattggattccattgccacatatgttttttggaatgttaggaacaattaaattatctttattgatttaaagataaactagcacatttgctcactctttccctcccccaaaacactaaacactttctgagcactgagcttgtaatggtggatatcatttagaatttgctatgaaatttggagaagtttattccttaagtgggacatttctgtggcaacgtgattgaccatggtcaaaaaattggcatttgctgaatttttttttcttacaatcttttgtttaaaccttgagttgctctgcaaatcagaaatttccttcttgaatctcagctcaaggagtttggggtgaaagtttttttaaaagaagagagaatgggatccagattgttaaggcagcacggtctgtcatggtagtattcatttcaactccactgacttcttccttcctcttccgtggctgttcttcctctctcattgctctctctggggacttccatgcaggacatccccggattaggtgacgacggttatggaacaaagactctgagtaagtttccaggaatggtcactgtaacttttcttttcttttcctttccttttgagtttggcttttgttccttttcctgagggcctttcactcctagcatgcacaagatacgagttttatttgttacctagctgtgaatgctcctacaaagtaactttcgatcgttttgttctgcatgtcagcatttaaaagcaaaatgtatcaggcacyctaacttctgttgcagttaacaccatccctttctgaccatgtgatattatcaacatggtcctgatgcccaccatagcatcacttgctctgccgcttaatacctccatagagcaagaaaccatgttgaaagaaagggtgagctaagtgttctagaacagcaaaacagaaatgtactttatgttctttcttctgccttttcacatggaaatatttaatgaccttgtcaaatctcataattgggttgcactttgctgttagtaaaggagctgtttcrtagtcaaaaggaacatgcattctctaaaagcaaattttaagctactkgagattccatgagtatttatttatttgttattaactttgatttttttttctgacttgcggtgatcctgcttgaaatgtttaaagtttggatatgtaataatatgcctatcagtgatttattagctacattataaaatcaggtcttcactttatagcatagagtgaaaaakaaaatatattaagcctttacattttctaattgttcatgtatttagtctgtatctgattgcactaagcaactaaaaaataattatcctgtgtcttaatatactacattatgatttttcctctttaataactaaccccattgtgtaggcaccaatgaaatgagaacagagttttgtgtcttttgcaactgtatcacatgtttaattttttttgttttgttgttttaaattaacagctatgggcaatatttttagaagctgtttatttgtataaaacaaaattgcattgaactggactttgttttcaagggctctttctataaccctgagtattgatactcctcataattcaaattgttcayttggagagtttttaaaagatatttatatttttaaaaatctgatcaagagtactgatcttaaagatgaaaactttatttttgagttactatatggaatatgatagaaaatttttcctgaattagtggctgaagtttaaatattgatttcagcattatctggacagcatcaagcaccaccagagagaatttgtaaactttcaatttgagagggaaaagaaacatcttaatatattgttaataataaatatcactaaaaagtagtggcttttggagtgtcagaaataggacaccatttcaatccagaatatgcaaatgtttgtttgctctttaaaaattgaacaaatttaaaaagtaaaacttcgcaacaacaacaaaaagccctgtcttacccaattcaaggcacttaagataataatctccatgaaatgcactattattgattatgtgccttgactttcattttagtaacagaaaacagatttgcacaggttcatccacacttctttccctattgcctctttgcacttgcaaaacatgtgcccaaattagtaatgcagttctgatcacagaccaacacaaagagaaatgatttgtgtgaatttaacccatgctttggttttcattagtttcatgctttaaaactactctatccaattggcaagaatgtatgatatcaaagcacttttttattgttagagaataattttatatattatttttctctttctaaaaatgtataactattgtcactttttaaaaaactgatgttatttatagtgagcttcagaaatcaaatagtcacatgttcttcatttaattaaagtaatatacaaataagttcatagactgatgagtgtatcatctataacttaacaagcagtatggatgagcgaaaatgattttagaaataagagctcaaattctggcatataaccaacacatccctgttaagttaggtgaactatgtatgaaaaaacaatttggagtattgctgtgcaagcaagtcattcagcatgaatttaaaaaaaacatacttcagccagaacctgtaccgtgtatcaggccatttatctcctgcctgttccatgccactagtattcaatagctatccaagcaagaatcctaaaataaaaacaaggaactattgagctgattcgtaaaatattattcagtgactcacatcttcctcaaagattttcaactcactcactgaagcagaaaagatcttcaagaattccttttcatcctgagratgtgtttaggaactatttaaatagaaataaaattcaagggattccagggatcaattagcaatttgagcagcgttccagcaaaattcttaaaggctaaaattgagaaataaaaaagcctgcaagaaaacactgcctacacaccagaagcgtctgaatttatagtcaagaaaacactcagtcaagacatactagtcattgtcacataaatcttgaaagtcagaggtatatgaatgggtcatagtatttttctaatcgcctaaattgacattatgcattttttgtaattaaagatactttcttcatttgctaaaaagaagaaacagcaatcaagcagcgggttcctgtaaaatggagataaagttttcatcttctttatcttatctgagttttcttaatgcagcctcctctgcggcttttacttgcctttcgctcacatttctggtagccttgcatgagtgtattcctttccgttctggctgctcttcaatgcttggtatctctttaatttgctgtgctgttcttgcagaacatgtttcttctaatgccagcgatagcgaaagtagctaccgtaagttactgctttggtttgcggttattttctttgcaattgccccattgcctgtggtggtcatttcagatttctgttgttgtttttcaattgctaccttttatcatctgtattcaaagcaaatggcttgaaatgaaatcactggatgtggaaagataaaaaagacactagagccatcagtgcacccttatgtgatttgtgcaagtagtagtggtcttgctaataaacaattccaacctcagttggttgtgactcagtgattcaattctcacagagaaggtgtgtaaaaagttcaacgtggtggatttttacattgtaacccccaaaataattgaaactctcagcaggaggtggaaaatcatcatggtattgttttccttcttattttgccatttcctttctgttcttggctcccctttataggaaaagcatttataaataaagtgttcctttaaaatcaggtttgaatcttttacatcactttctctttgattaatcttttaagataggatactatgacatttctaactttacttttttgataattggggaactgatggaagagtttcatcctctaatgttgaaggaacttaatttttttaaatgtgaccaagtcttcttagatcagaaaacttagctgaaaaggtaggtaactatttaaaagttatttctggtctttgtttggtcacctcaagccatttgcttagtgtatgaaactatccaccaaacaccratcacatccttttgatcagtcctcatggttttttaccacctacttacttactggtttttggtgactaacatagatacatatttttactaggattcttatgatttctatgagattaatttatattccttagtgaaatgggttacccaaaaagcacgcctaatacctgtgacccacagatgctaaggcagaaattggtgttgtcttttgtttgaatgagtattgtattaattgaaaactagaattgtttgaggttttcccccccccgttatagcatggtactttacaaaaccatgcctttttgaggtggaaggccaaayagtggtacaacacataatttggatttttaagaaaggctttggaaaatcagaggggtggcaagtaggagcagcagcacaaaagtggaaagatggcagatggaggtaggctcagagaaggaagatgtagaccaaggaataaaatgaagaaaattgtaatgagatacccttggtcaatcaaacgttagattgatataggaaccacctaattttcttattgatgaaagttttattgattgattgatagaagaaattccatcaattcttgttgatggaagaattcagaaggttcttgttatcaacacggtaacatgtcaacatttttacattctttatacttttataattttattattatcctaatttcagaaaaaaaatttgcctctcccctttttcattttattttaaaccaagaaactaagccaagaagaattgaccaaagcttgtgttaataacacctaagctgccctcaatttagtacgtagaaaaatataacttattttctgggttccaggaagaccaatgacactagtttccttgatgttcagttttcaattttcaagtgttgtgcttccatccagtagacacaggtatcgaaaaagaaagcatcatgctttatctttcagttcttttaatggaaaatatatactatacaagaactaccttttcttataaaaatcacatttttatagagtattttaaaggcttctcttctctgtttcagaggtgggaatatttttcccagaattattaagttataaaaactggcccaagactttcaactacttggcagatttttagagtgatgttctaagatgacatcaataattatttttactctaaatactagttgcacataaatgtttattgaatgaataaaggaaacacttgcaggcatctcaaattatctatgagaagagagaagagttggaactggattctatgacattagtagggcaaatatggaatctaattatctctattggcttgagtctcatccaaggttacagaaggccagccactcagtttgttttctttacaaatgaacaaaagtaagaagagtctttatcacagctcagaggagaaaaatgacatgtattcctccagaatggaaatatgaagaattccagaggaatgtttatttattcattcggtacctactatacatgaggtcctcttcttggataccatgagacccattgtgaatatcaactaactctagatctcagcacacataatagtaggagagagatataaataaatgaaaaagtgcacaaagtgtgacaggtactaagatagattgatgtctggctcaagaatagtgggagcataagaggtagtttcagagaggaagtagctttgagctgagctttggaaagatgaggaacttgctagctaggcaagatgaggaaggaacttcccagaaagagcactgccatgaaaaaagacacacaggtttggaacaaatatattttccaggaggtaccaactttgaagtcaaaataggctgcatttttctagtgmattcctggcttttgctgtaattatgactaaaaatagtataaacaaatacaaaaaaaaacccctcttttcaccaatatccaggtgttgtatttcactgttatactttaccattccatatccactctgggaacaaaatggctaaataattgtaataattcagagttagaaacaaagacctaggcccttgtgtttcacaatccattgtgtttcacagtctggagtacaccattcacactgtatcctggagttacacatcgtggcaaccttacttcaaagtcttacatgtttcctgaggtaggccacacacacatagatacacacaaacatcaatttctaataaatagttcagatctttgctgcatcatctcaagcattataaaataggttttccaactatmtttagcaccagctaaaattgcagctgataaagtgtacattgtctaattgtgcaaaacaccacctcaaaactatcttaattataggctaattctagatttatgtcaataaagtagtaaaattcagccttgtatttttggctgttctgtataataccttacagtcacccatgtattaggaggtggtaaatactaggcaagtatattgaggactatgcaagcttctaaagctgaagacatgccttcctcaaagctcagtaaagctctttacatcatcatggatgtgtgcaagctgataattatccttccaacccattagtgctcaccagttaagtaggattttcaaaacaaggatcttgaagaactaatctgagtgaaactaacgtgttgagatcaggagacccaaaacttctccactggagtcagtcaaaatggtgcatattcttcaccttactctattattctcaactattgcccttagatgtctttactcctttagtctttataaagcagtttttcattacatctattatctcatttaatttctgcaacaaaactatttattagacatgttttacattaatagccccatttccatatgaggaagccgaagctccaagaggctgcctgccttattaaagtagtggcactgcaaatccaaccaagacctcttaattctgaatcccattcatttttcactcttccctgtagtttgtaatccaagcctgacattttacctagtaactttcaaccatttcatactacctataaagttaatacaaacaacaacatttatataacattatgcaccaagtctgattttaaggactgtaygtatattaagttcatcttctgaacatcctatggagacaatttgccatgaatttactatatgaccttaaacaaattacttaaagtctttgagactcagttctctcctatgtaaaatgagtagcttgaattagaatagaaatggcaaataaattttaatcaaggttcaaactcgaaccaattggcagtagctgcctgaagagttgtaatgaaaagtattctaaggccatgttgaggctcagcagtaatcccggcaatgatcagtttgtgatgcctgtcaagatcacagagagtaatagtgtgtggtatgtacttgccatctatgaagcacatgaaccctaagccctttcttagcactagcattctatgactctaagaacctaattagttcttaaaaatcatcatatgcaggcactaaaaacaaaattttgagcattaaacgtactgccactggtcttcaactccatcatctctgttttctagtttccaggaattcctaaagaayggcaatttgcttttctctagcataaaggttactagggtctctcattgtgactggcttccagtttaaacacatagtgttttgtggcgactgtgacaaaaccctctgcgaagtctctggcagctgctgacatccacacacagctctgtgctgctctcccactttcagccatacagttgccaaaacaaaaccaagaaatagtttgtacctttttgtcagctgttattttgaagtgccaacccctcctgagcagaaaatagaaaaactcttaaggatgactattttatggggatgacacaacagcaaaagaaaaagaaacaaagaaagaaagagagagaaaagaaaagaaaagaaaaaaagaagagagaaaagaaaagagagagaacttgtgtttagaggcagagtatctgatggcctcttaataaccccgacctggtttcagcccctatctctctcttcaattttttcttcatttgttagctttacctcaacacccacccaccctgccccacagagaattctgcttctctcactgtttcaagacagtgcaatatactccacaagagttgaaaaaggtgcagtattaaatcttgactccactacttactagctgaggaatcagggctcattaacatctctgagcctcagcttcttcatctgtaaaatggggatcatcagagtacctacctcaagcaatgcctgtgagacataaaagccagtgggtatgaaagcccctcaaggcccgcaaagtgccacaaagacatgaattttctctccttcatcacagtggctttttctctttccctttgtctcttcctcattacccatagggcttttcattcttggacatggaagtaaaaattagtttaagatgctgaattcacagcaattatgtcatgcccacctccacgggtttccccacaggcttcctgggtattacacagtacctgattgccacaaggtcttgagaattggggtggcccggacataagggatgctgccattgctgtctaccaacactactgctctgaaccagaaccagaaccagtgcctttcatagaaaagtaaaccaagaagtgatggatagacagagatagagaactcttgaacaaaattaatcaaagctatgctttgccctagttgtctgaatcgcaatcatacacactgacatcaaatatcttattaaagatttgcctttaraacgttccatcagaatgatttgcaaagccattgggaagagatttttatgggaacktgatgtgctctatttatttagagaaaacgatgctttccaaagttaaatgaccatattgacagaaacacaaaatagaacctaccgttggcctcatcactcatcctgtttcccatgactgaaatcagaatgcaaatttgttgacatctttctttatgttaagcactcaatggggcactggagacatggtgatgaataaaactcagttctcgcctttatgaaactcccagcctaataaggaggtccaagagttacctgacatttaaagcttttgttatcccatggtcagaattcttcccttgcacattaattgttgaagatttcccctgtaaagttatagtctaaaattgcaatgttagtctacgatgcttctatcattaaaactatactttctccccaagaatttttacacttctttaattgacccacagcattttcctgatgaagtaatactaaactaaaaccttgaatgcgtataccctctacatcgctcaggctttagataactgggggttagtaatcaatcaccttcatgttttttggcctaggctctgtacatttcagtagtttattcaaagggaatcattcttttcctgagtacaagaaatagtgaatctgactcctcactgaccaaacccctgaccaatgtggcagagtcccctgaacacttctggggtggccatgggtacataccacttaggaggagcatcaaggtccactctctgtacccttaagaagtagcttggcatggtggygccattctgagcccaggccctccttgggactgagataagatatgacttcagcctgaggccatttctcacacttgaaaaagtaagacactcctatccccatcccattccagctacccagcctccaaggaagtcatccaacttcgcagctatacccacatattgctcaatttccccaaatcagtctcattatcaaaacagtcgatcatattaactcttcttatgaaattacctctctttctgtggtgctgtggctgttgaaggaggaaaacytggcattgatagactatgaatgtgcttcaggggtgggtggtgaggatatacagcaaaggtgaattgccctttggtttcagaagttacctcatattccacttctgctccactatttcttctagtagacagaaagttcttttcaacagccctaacctattgctgttccaaaggttagtcaatgcaaaaaaaaatgcagacacttccgggtttgcaggtgaaattgagctaatcctctgaccaattaattcatcaattatataaaatagatgattgaaaaaataaatggcaaaaaccaatttactttctatggttatttgttgacttgaggtccaccctgagtcagaaggcttgtagcaratgacattggaggggctgacattttactactgtgtcttccttagttctctatctgaagtttcaacgcacagtttagcagcaattataaccaatgatgtaggacacacctcaatttttgatcttcattaattgacccacagcattttcctgacgaattaatattagagtaaaaccctgagtgtcctgatgaagtttttatatcataaatgaaataagcatatacttgcttttgaacagtgtgcttcttggggaaataaaatagaagatgaaataaaaggtacagcaattctgattatgtagcagccatctattgaattggaccctttccttgaactaaatggcttccttttaagtagtaatgcttggtgtagaggccatggcattccattctcaatgccagacagaaagaagtctcacaggtcattgccctgcagcaaatagctagcaaccagttattacttagagttatgactgtgaaaatctgayactaaaatggtgctaaagagktttwtgaggatgaagttatttttgaatggttcaaggagaaagagcaaggagaattaactctgagctgtgtctgtttcctgtgtttcagagcagggcttgtctctgtaatatatgactgttagttcactgtggttttctttccttctcttctcaggaggacaagaagacctcattctttcctatgagcctgttacaaggcaggaaagtaagtttcccagcacgctttcattcctaatttctgggccataagaggtgacatcattgaaggagggaaagagtgaaggactaaggagaataarctcggcttaatgctctgttgtcttgagaccgtaccttactcttacgctgtctctcactttctctctctttgaccctatcaccaaacagacaacttcctgctgagtatgggcactaatagcacctaagagaaggatgcagccctccagatgagtggtcctcaatgggaaggaacacattcaaattacctaaagagcactagctacgagactggtgaataaattctcctgagagactgatgtcagctcagtattgagaatgactttctagcagatctgcctaagatrtaggctatctgtaagctgctgctttttcctggaggcatttatacagaggctaattgctactgacaaggatactgcagagagaattcaagcatcagatggggacttgtacccaatgaactctcaggytccttctaatcccagatacaaggaaatctagaaacygtagcaaagtatagagagtattttgatctggggaaaagaaatcatgaaaacataagatgttattactactaacaattactttttatagtcatatctaaacaatagccaaacagctggtttggattcttttttctcccactcagttgactaaattcagttgttttgacattatgtaggcagagccagagagtaagcaaaactcctccaaatgtttcttttcatcracagatactgcaattgcctttccctgctagtagattccagaaagtaggcactgccaatctcctgagtgttaaacatcaatttccctatgcaaggctgtatgagtaatttatccagtgaagtaatgccsttagcatctcttactgtctggcaattaagaatcacccttgcaggacagttttgcagttgtttccaactctttctctttacctacatcttcctttcccattctgcagtaaactacacccggccggtgattatcctggggcccatgaaggatmggatcaatgacgacttgatatctgaattccctgataaatttggctcctgtgtgcctcgtaagtgtcatttttctttcctctaggaaaaacaaaaagagcttrgatttctttatgagatggtaaaatgtaattccatcctccagtagtctctccagtaattcaaataccaaccatttccgattagctgagtgccttatttaatttatttgcctaacacttttcatttatgctgccgtgtgtcattctgtatttaataaaaataataatgttttctctaaactgattgtagccccttaaaaggcaggatgaatttttgtggcccccaaccatttaaaacagcataggatttatgataggcatcagtatgttttyatagattgatcaaaatgccactgaaacattattttttataggatggaagagatcggaaacaaagccatatattaaaatcctctcaggatgacttagggccatatgtcaatcccaaaacccaataggctttcccatgttgacagtcccaggtttagggagggtgaagacaagaaaatgtgtaacacttcaatttgacctctaggccattacagactttaaactactttcttctcattatakattatcatcargcttctggtccctctgattgtagccttattagattctaactgctctgcctcttcccctccccacccctaccatactttctccactcattcaccccgtctacaccccgactctgtcaaacagaaatgcatgcagaccttctacgtatgtagacaggtccatcaggaaattttaatttattagataatggagctcttacatctgataccaacaaatatttctcttccattctatgtgttttaagcctgatgctttcaagtgtctctaacattccagtactgcaaattttacatgagatacttaagaatagcaggaattgtatgtgtccagtacatggccaaaagactaggatgattgctgtatctcatgaaacaattcccagcaagggctctgggaagagatcctgccatagaacatatcctgagaaagtcttcagacaggaaggagcaaatgaaactccaggtcgtttacagcaagcttccagcttgctcctccacttttgagagaaagaaaacagaaggtacttaagcattctttctgctttccctttcaccttgcatattctctcttttttgaattaatagaaccattttgtgatagtcaatagatgttcattgtacaaaacttcaaaaacactaaaaagraagttaaacgagaaaattagaagtatacaaaatcccacacaatacccagagataacatcattgttaatatttttgtacatttccatctattctttctatgcatgcattttttctctgtgatgatttttttgcttatttaaaattttatataactatttcaaatgattattatatcccaattaatcattctttatgaacattttggtttttccctatttttcactattatgaattgtgacaaaaatatcatcgtaattgtgttataattattacttataaaataatataatgaatatctttaaggataaatctgtatctgaagttttgatcatttttaaaaacatatttctaggaaaaaataagtgagtcaaagattaaaaatattttaacagcttttattcatattgctagattgctttccccttctcttcttaccaaaaaatttaggtgaaatggttagagttgctgatttttagtcctatctaactgtgattatcttattttatatatgttgagagtctgaattttatggtcctttatagaatgttaagtttttgttctgacaggtgataatttactgacacagcagcttcttccatttgtgacatggttttagactttgtgaagatgggtgtagagtaagtctagagtaaccttttaaaatgtggcctttctgggatctccatgggttctgactcaactcccgtgtcttctagcaccatgtgatgtctaaactctccatttggaaatggcctctaggtagagaggtggggtgaatgctctctcatatgtttctcttttctcaaagattacagccctgtacttcctgttgtctgatatctgaaaacagttgtttcatatattttgtccagttttttagttgcttatggtgggagggtaagactagtacctgttactatgtcatatttcttcatactrcatatttctacatatcaatgttgaggatgtggtggagaatataggtgtaaagcaagtttatgggtataaatgcaccttaattttatcattttttgttttataaagatactacgaggccaaagcgagactacgaggtggatggcagagactatcactttgtcatttccagagaacaaatggagaaagatatccaagagcacaagtttatagaagccggccagtacaatgacaatttatatggaaccagtgtgcagtctgtgagatttgtagcagaaagagtatgttcaccaatcttcttacacctcccctgaagaaggtttctaggttgcaaactgcatttttttttttttttggtcattactctttcttgattgcaattgtaaattttgatttaataatttaaaacatccaagcagagaatcaccttagagcaatgtcattaatctttgttctaatttcaataaagtattctcactgacttggaaaaagtaggaagagggctttgtctttgactcactatctgaggccccaatacacaaccttgattttattaaggcaggtttactactttagttgtaaaccaaggggatagcattcctgaattattttgttagaggaagttattttttttctctctctctgaaaacttgacatcctcatggtagaagagaagatagatgagaagggctgcccagccttttgctcgcagaagttctagcttagaggaggtgtagatgctgctattatctttttgctggtaacttcaggggcatggaaaagagaagaatgttcaagagagggtaccataggaaggcacctgggtgtggctayacaatctgcctacagagggatcctatttcctgtgaacacagagaaccagtatcataggagaagatatttgttgggttgatttgatttgccatgacctttctcaatgtaccgctaaagaattaagtaattttgatgtctatctaagaatacactaagaagttgcatctattttcctccctctcaaaagttcagttctatcaactaaatgaatactggttctagtcaaactgtcctggataattgcacctattttcctctttgttcatgttgttaacttgaaatgttctgactggtgaataatcaaccagcatttatacatgttatgtggctgctgcacttcacagatagaaaacttgaaatctattacctaagtaataacggcttgaaccatcttagtgggtttctcagataagaagacttcaagtattcactggactgtattcattttcatgtgaacattatagatgagattttagcccttattattgatttagkattgttcctatctgcataaagtgccttttttctcttcttgcataaagttattctagcctcagggtaatgaggacatttctctccaggaggtagaatatgatgtggcaaatgtatctgcatatccagaaatgctttataaagcagctgcttgctctgagcactcattgtggtggaagccaagttaaatgaggtgtgctataatgtaatagcatttttatttgttaacaaacaagaaatttacatacctcatgcaagcctttctctcttggcatttaacccgcatttaatttatatatatatatatatatatgttttaattatatattttatatgtgtgtgtgtatatatatatatatatatatatatatatatatatatatacatatagtttttattttttttgagatggcatttcactcttattgcccaggctggaatgccatggcacggtctcagctcactgcaacctccacctcctgggttcaagtgattctcctgcctcagcctctcaagtagctgggattacaggtgcccaccaccatgcctggtgaactttttggatttttagcagagacagggtctcaccattttggtcaggctggtctcgaactcctgatctcaggtgatccacccgcctcggcctcctagagtgctaggattacagccatgagccactgcacccaaccaaccatatgtttaagttaaccatttttgtgtctgccctccactagactgagtaccttgcagacaggatatgtacaagtacttggaaaaattcacattattctcaatcttccacaccgaatgttgggcagggtgagacaatgaggtgtctattttttccaaccaacaattctgttagtgctccagacttgggtttgcatgctcctagcactaaactattgggcaagttagttagtgtgagtcttctgtaaaatgcagctgataatacctacctcagagatttgggaatttcttctgacaattgtgttcagagatggtttttaaacttcatgagaacagactcagtcacataacatacggctgcatgtcatctttgtgtgttacatcaggtatttaactgagagaacatatgtaaaatgtccagtccagtagcagacactttgtaaggggctagttagtattagttattgtaaacactcaatgatgaccctatatatcgatttttatttactctttgcagtgatctttttctgactttagaaatccagcatcccctrccttcctctaaaacctacatacattagtttccttttgttggattatggccatgcttcctatattaacttcatatttttcttctctttctaccagggcaaacactgtatacttgatgtatcaggaaatgctatcaagcggttacaagttgcccagctctatcccattgccatcttcataaaacccaggtctctggaacctcttatgtgagtagagggcattggaggccttcatccaactgactccctgttctgtattatactgaaaattactaacaggattttgctgggaatgcttacaaatgggaaatgccattgttgatttttcagcattctctttttttgaagatatatcaaagttcttttaaacaactagaaacataatgtcagtgatttctttttttaacatccctcattttaacaataatagtaattccttaaaacatcttcaataatgtttcctgatttttattgttttacttcacggattgttttctttgttagtttttgaggttttgttgttgttgttttgaggatagcttggcttgatttggttttttggtttgcttttgttttccaaatgataggaagcaatcattttttaattgtctcatacttctgaggcaggtctataagtaaatctttttaaatgtgtagattttttatagagagagcagacaacgtttgagacttttttcattggcattttccttggttctctaatagaattctratgttccttaattaaaactttacatacatagaacatcgttcttaatagagttttcttagtggcgtggcagtaaaacatctgtaacttaaaccagtagcttcatacctgtgcactcagggttttttctttttttttcccctccaaaggacttgtgaaataacttctttcaagaatcattaaacaaagtgggcagacattcacgatctgactgtaaagtcagtataggcaactcccattcacaaaggtgaagctacagtagatagaggtaaccagaaaaggggctaccagcagggacctgaaaattgatcaggcaagatttggttctttactttgccactgatcagttaagtaaccttgggcaaattgcttgacctttctaagatttagctcctcacctcgaaacgaggcatactaataaatacctcatagagctagtataaaggttaaataacaagattaggaatttagtaaagctgttcatgtactctttggcatatggtaagtactcaataaataatacctattattattgtaaaagatataaaattacttcattataaaggaataaaactattttatcattataaaacacataaacagtacctcttccatgacagtgcaagagataatgccaatgtgtctgtcatgagggccttgatcaaattttgccttcatctgggcctcaagaccatagtgtttgacagggttcaggagtgaaccacagagtactggaaaataatgtttatggaaggaccgaagaaacagaaattatttaatcccagtggtgaaagcaattgcttacagaggatattaactgttctgtgtctcctctgaagacaaagaagcaaagcaaactgcagcagctggagtggcagcctgagagaattaagttaaatacatagttgagctctggggaaatagccagagatgtaccttgaaagcagaatatagtcccatatataaaaaatggacaaggattcttaccaggataaaaaaagtaagatcgggaggtcactgacagtaccttcagccccatgaatttaggtattaaattataatataaagagtttttcccatggctggcacatggaaaaayatgtactaatgataaaataatgattcttaatattatcatccccaatagcatgtattaaatttctccttgtataggatactatgtcgggcattgcacaaagtgaattaagcaagtacaaatttcatgatgtaaaattgatttataatctgtcaagagcctcataaatataagtaatgctaacattaatgagaagaaaaatagtccttacttcctgggaacagccatcttaaaggcctgtttcagaaatagaaaaataaatcttcattgtaaacactcagtgggataaatggcttcccaggggaatgaggcctgagggaacgacagcagtggcacatttggtccggtgcratattaggagacagtcccatctggcattccayaggagaaggtctactgccttccacaactatgagatgacttattttagttatgccttagggcactgtcacagccacttatcaccaaggaaagttaaatgtactaaaggctggacttcacaataaggacagtgaatctgacataatttgctgcagccatattcatgggtctcaagtgcagtgatggtgacattcagaccaatgcaatctacctactaaaggttggatgtttactttacagttcactcttttccaaggcttttactccaggagcaaagctgccatgaattgcccattccccagagagtagtgaatgctaggtcagccggaacaaaagcatgacagctgtcacatttacacattgatacatcatcacacacattatttctcaagtgcatcatccacatcaaatcacagagcttattagcacatacatagctgactcttcagaggagcataaaatcaaagatgtgtatgaaagggatgttctttttatattgtgccaccatctgacttctgttccctttccatgtggcaatstcccttcaccctgccacttccaatctgcttttaccttcctgctcccatgatgctctgtgtttacttctgtcttcaactatcttataattatgtttatctagctccccatttgttcattcattcattcatttactcatctattcattcaacaaataaatgttgaatcagtctccrtgccacatgctgacaaacaagccatggtcttcgccctcaaagaattactgatcagtcaaggagacaaaataaattcacaggtcagagaataaaaacctaaactaagtcattgctgtaatcagtaaaaagggaattcagagaagacagaattcttggaaggcaggtcgaagatgatccagaactatgtgatttctttctttgagacagggtcttgctctgtccagcccaagctggagtgtagtggtgccatcatggctcactgcagtcatgacctcgtgggctcaagccatgttcccacctcagcctcccaagtagctgggactaaaggtatgtgccaccatacccagctaatgtttgtattttttttgtggagacagggtttcaccctgttgcccaggctggtcttgaactcctgagcacaagtgatccacctgcctcagcctcccaaggtgttgggattacagacgtgaaccactgtgcctggcccacatgatttcttgacatctggagcaaatatttatctttctctgaagagtgtcccttggtttagcccagcatcttctccacccacgagtaacatccattcacagcatgtacagctgagactgtttggaagaaaaattatacrtaacacccctcaggacaagatgagtttagcaacaagagttcaggaaattctcactactttgtatttcagccattaatgtctaatgtcaatatattgttttttttttttttccaaatagcctcttttgaaagatatcaagtcttggtataataggaagtctaactgaaaattggtttaaaaaaccaaaaccttgagttcttaccccagattactcttcgttaaatacacagccttaagcacatcccttcttgcctctgttacttgctctcgaaaggaattgactaaggccagatgttccagacccaaatctctggcttcctaagcagcatgcaagacggtaatgatttcagaaattctacatgcacctgtgatgcatcctgatcagccaaccaaattgcatttggcaggacattttttttttaacacctggaagaccyggaaagataaagctgccagtagttaagaatcaatagattaggttttagagagaattcaagaatttttcatttctctcccaccttgatttatccttgagccttttaaaaaaaatttatatataatagttgtacaaatttttggagtatatgtcatattttaatacctgtatacaatgtgtaatgatcaaatcagggtaactggaatatccatcaccagaaatgttttgggaacattacagttcttctcttctagctattttgaaatattcctataactgcattttataccccttaaccagcttctcttcatctcccctcctgccttcccttcccagtctctgataactaccattctactctcacatttcagaaagtctgagatacactagaacaaactccaagaaagggtggtcaggaaagttcagatttagaaatcacatccaatgaggggatagatgaagcaataggacagtttattctgaagaagtagaagcctcaagacacacttaagcactttacttaaatatcctagggcctaccatggaggatattaggtccctgcagaacagggaccagtgactacaaatcataaggagacatatttggcttcaatccaatgtgggaccaagagactgccctttgagagaatgagctttctggccgtgagtccttgttgctgaaattattccagcacagaggagtcctgaatgaagactaaaaacctgttgctaagattacactatgttttctgtaggatttatttttgccatacattttaattttttaggatttggaatattccctttatgttctaatacaaaccctcattttcccagggagatgaataagcgtctaacagaggaacaagccaagaaaacctatgatcgagcaattaagctagaacaagaatttggagaatattttacaggtaagttcacttttaccctggtagtgtgagaaaggggataaattgtctgacatttggcacagagagggttctgggcctggtgtacttgtgccctaaaaccttcctgttgagaatccctaatatctgtttcatatacaaggagtatccctctgcttcacccattttgatgtaaaaccctgggttctcctgagagttcagctgcagccagctcccaggttcccaccagccctacccaaaaccatgggcaggagatacccctgagctatctcctaccatgaaaaggatttgaggcattgctacctcattaaactatctccctgatatcatcagaaaacttgaaaaacaaaattttagggctcaaaatggtcagtgtccaaagcagttactcttgagaagaagcttggaggcgtccgtccccagctccatgagctttcatcagtgtccctatcagcagcacctgaacaagatgcttaaaacttcctcatgtttcagttcactgtgtcaagtctcaaccaaaactgctttttttttctttttaaatgtttccttggaaacatgaaggggaatagaggttttcttctggagagcctgagttctgagttctgtattcctatatactttcatagaacactgagtaatcagactttgtgaaatttgccttacacctggttcccggaggtttaaaaacaagaactttcgagctgggcttatgcctctaatcccagcactttgggaggctgaggtgggtggatcacctgaggtcaggagttcgagaccagcctggccaacatagtgaaacccccgtctctactaaaaatacaaaaaattagctgggtgtggtggcaggcacctgtaatcccagctactagggaggctgagacaggagaatcacttgaacccaggaggtggaggtcgcagtgagccgagatcgtgctactgcactccagcctgggcaacaagggtgaaattctgtctcaaaaaaaaaaaaaaaaaaaaaaaaaacccaagaactttcttcctggattaccatatgtgaagttagatgttttattttttaccttattcagaatatagaaagtgtcagtgccttagcagtttgtaaatatcttgaatcaggtaatattaagtaatctttctgtcagtaaccaagatacgagctgtgtttcatcctaaaagaacatccaggtaggagaaacaaaagtgtacattttgacagtggtttatattttgtatacaatacaataatatattctgaggattgtttttaaatatctaaatcatctttcagtagtaatttatttttaagacctagtgtcatatggataatactgatgtgttttggaaatctttctacaagataacttttgttcaaatgagacaataaaatgtacttaaatctactccaagtgacttagtgttttaggagatacacaactgagcagtttgtttatatttcttcctgtttatgtttcttataaatagtggacttatggtattctcaatatgaatagctctgtatggtaaaaatctcaagttaccagagatttggggaattaatgggttttcctattaagggctttgagggttgggaggctaactaaacttccctctaaaatcttcattatttcctcggtgtctacaatatctgaatttctgctgctgccaaaataagtaaatatacagactgtaaggccagttttcttttctaaatagggagctctcagtctgaaaattgatcattgcccagctcagtgcctggctcagagtaggcacccataaaatattggttaaatagatgagtgataaattgtccagtactacagacagacatgtagaaagtgcaaagactgtgaatcatttgttactgatccaggatatccattgaaagcatttcttaaaatcatgaatgtaactttgcttatatgaattttctgcttcttcttactaatgaaaaatgatatgaagcttcctgatgagtcatctgctactgatttgagcctccaatgtgtaagtgatgattgttcttcaccatccaggaaattatttctaattctgggtgtgtttgcttttgttacagctattgtccaaggagatactttagaagatatatataaccaatgcaagcttgttattgaagagcaatctgggcctttcatctggattccctcaaaggaaaagttataaattagctactgcgcctctgacaacgacagaagagcatttagaagaacaaaatatatataacatactacttggaggcttttatgtttttgttgcatttatgtttttgcagtcaatgtgaattcttacgaatgtacaacacaaactgtatgaagccatgaaggaaacagaggggccaaagggtgggacagaaaagacattgcagtatgaaggaaggctttggtttgctcaaagtgccaggtgtagggatgaacctctgacgggctttctgcccaagagatgagatgagagcctcctcaccccagcagatgtccagagctgatttagctgcagagctctctgtgtcttttgctttaaagaaaaattgccagcactcgaacctcatcagccttcccattacccacatctgtaattggtacactttgaattttataactatgcacatcttttgatttcttaacaagcaaatgaaagaaagaaggaaaaaagaaaggaatccctttggagaygacatactatcagggaaggataagtgtgtagttttttgactggcatctgcaaagacaagaatttcataaaatttgcaagtgtatggaggactaacctcactgacaggaggggattccacctgggattagctttatgattgttgattgcctattttgccatttataaactgaaagaaggcactaaagatgagaataatttatacaataaaaatatattaaatgtatagaaacaaatttctataggttaaaaaagttttgtgaaatattttgtaaagactaatattgaaagactaaatgtatgcaacatcagcagatgatcaaattcaagacctgaaagttgcactctcccttttgttgccaatgatctgttaagagcatctgagttccttttaagtctgacaaagacttcttcctcacttacctcccttccacattagtgatacactctcatgcagcacatcccttaatgagttgccctcatggatatttttggaagacatttggttaatgcatttttttatgctgatggcttttcagagacaaacttatgcaaatgatctaaagggaagtttttgctttcctctagttaaataacctgagcctgccatgcaaatagttgaataactttgttcctagttactgacatacaattcttaaaggaccatttagcattttggccaacaatgagtaattaggattagtacctttttgttttacagagtaactgagagttttgtaacatccasagatggtactagagccaatgagagatctgttcctagatgcactatttctttgaggaagagagagaagagaagtgtctggttgggggtgagggggtgcagacttttttgtttctatgtacagagcaaagagatagagtcacaaggaaagacaattaatgactttgagctcaaccaactgaactgcctttcttggagctgcacctggaccaagtttattttttaacaattataataacgatgatttaaaaaaagaaacctcccaaagcctataaactgaactagaagagttggtttcccactttagagtggatggcgacatcagcattgcttttgcccatggtgtttggggagagacttttcagtgataataaccactctactctgggttctgtgcatgcccagactaagccccatcgccttatttctggggtacatccagacctggcagggattctgccacactgtgcagcaaaccagcatgtaggctgggtaggagagcaagagatagagccatcagagtgatggggcttcttcacagtaagaacatcggagcttagaatgagagtctctttccaaaaacwggcattgttcatcttacgctaaacatcattgtctgcctggctacagtyaccaaaacaaaacagaaatgcaaaattatgcatcttcccatagtcctgaggcttcctttgccaatggaagggctagcaatgcattctccctctcatgaaagttaaatttccagagacttccttagattgctcaaaatgttaaagatatgtccatgtckgcaattcgccagtttcaggtcaaggcctactttcatcaatattgctcccagaagttttctgacaccagaatgccattcctgatcccagctctatttttaggccaccacgataacttctttggtttctcaactgagcatgcaaccatttatttaaaagactgtcattaatgagtagatgttttcgcgggtcgtgtgatgtgctttccatttactagtgttgctgtggctaagtacaatcaaattgaaccaccaacccttggttttgtagtaatataactatttattttcctagtgtagatgctttcagattagaattggcatttgcactgatttttttatgtagatttatataaatatatagatacatatatatttgcttgaagaatcaccaagcaaattggtgagagggtcttttccaatagaatttacacctccatttgttgtgttgtcttgcacttcccaatgttgatgtctctatggctccaatgaactggtgtattttgcagcaaatctgatgacttgtatggaaatggcatgaaagttacccagattacatctggtgcaaatgcactcggagcctggggccagactggtgctaacactgcaaactttgtccagagctctctccaacctgaaggcttgctgggggtgcaatgtcaccttcacacatgctgggccctttcagaaaagtgccagatcgtgtaactggtgctatttttcatgctctggtacaatgtgtagcaccacgggggtctcagctttaccaaaatcaaaattccatttgtcagctaagtgcagaggcatttgttttttgctctcctcccacagaattgtcggccatttatttgcaggccttttgcgggatttcttggctatttatttgcaggccttttttcccagccccaaattcttgggttggctctgtctgcttaaagagcctgtcttcacaaagctgcactcgggtgcctctgtgcgctgtcttagatcctactgccggcccttcaggactccgagccaggaaagaactctccaacctctggctcgagactctactttttttctcattcttttccttactctcctcctccttctacttccgactaattccatctctttttttttttgttcctctccttttcctattcctccttcccaccatctctgagttgttgactttctcctataatccttctctattccctttctctttttgtccacctctcctttagtctctgtttctctgcccttcttattcctcttctgtcctttctcctctcctcaaatctctgatcatcttctcccgtacatccctgtattgatttttctgtcctctaaagggctcatggctgattcagacagcaagtccatgcactggactaatgacacaaatactttaggtcgccgtttcacctactcagcccagaaagtaaagctgagcgtgaggccctgacctggagcctgctccagcccgcctcccggagccagcctgcaccgttgccctggcagcgatgatgcatgtgctgtgggccctgccggcgcctgagtgcctctgcctgaacactgctcctaagcgagcccactcccagcactaccgcatggctctgaggacattttctttcaataaaggcagactctggccccaattattctgatagcaaacctcttcctcctcattgaagccatgccatcaccttggtttggagagagacatttttttcccattcataagctttctttttcccatttttatgtgaagccccctctgcttttcagctggtgattgctctggtgagactgaatggacttgctggtgaaatgaaatctcttctttcctgtcttggtcctgcctaaattcctacaaatatatttaagccaaggactcaggctaattcctaagttgatcacattaatttgttactcctagagggaaaaagatcaattcccttgaagcatgtggagtacctcctgtgacagctgacttgccaggggactccctacagaattctgtgatatacattttacttctgtgtatgtatggtatatatggtatgtataccatgtacacacgttacattgagtatgaatgactgtggttggaaacmcacacacacactcaagtctgtaaatatccttcctcactgaaacctgtgctttggaaatcatttcttgtacagctgtgcagtttcttgtaacagctgaggacaaagctaagacaggcggacaatttagacaaagatcatctaaagagtatagtatctccctagcaactcatgaggacagacaaccaagtggcaaggttgactcccaatgggatggcagacttttcttctctcctttttgagtttgtgtttcctaagtgtttcttaacttctgagtgcaccaggctgtacccgttagatcctttcaatatgacagttttgtgcttctctctgacaggatgtttctccaccgagctgtagcacaggatgggagggaggtgggaatactccttgcctaggctggagtttacagagacactgcacagcttacactcctgttaagtgtaaatattcaacacttccattccatttgtgtaaaaaataaagcacacacgattataaaatcaagatgtatatttcatactcagtgtgtctgtgcatatttattgcgtttctagttgtcagcggtgggtggccccattgtaaaaatgcctgatagagtgtttataaacatgtcatggttttattataagatataaatattaaaacattttatactttatggcaaatgattttctcccaaagcataatttgtcttatttcataaggaatagaatcactcatgtctatttttatcaattttgtctctgattccagagctaaaatgcaattagggtgggtatgccctgagaagtattggcactgctgagakgaagtgaaagtgctgtttttgcatattcttaaatatttggttaccatcttgcctgcttttaatcgggatttttccaaaagtgaacaatgtattaaaagatagatttttaaagatgctcacagctatgtgaggggaaaaatcaatttcccagtgtcaaactgtgggattccagaagatattaaggatacagaaaaatgatttttttcttatctgaaacattatgcaaagaaaggcataaactggggaggaggtatcattgtcttatataccctggagctccaaagatttgaccatatcaaaaatgttgggtttgggaatctggatctgccagataatgttctaaatttttcacttcaggttaaatacatgccttgtcatattgacatttagccaggtttcacagctagagaaccaaaacaaattctactcatgaaagaggtgaaattttgcatcaaagcaattgctttggattatgctttgtttcatgataaactaccatataactgaatcagccatttgggaagccagactagttgttcataccatcctggccatcaggaatctgccaggtgtcctaaagctgtccttggtgctgggtagtgaacaaagactctcagacatggtataagaagacattgactgaggctgcaagacgtgtggacctcaaattttgacaattatgcaattttcaacatttgcacagtctcacctggtttaatattaatggtgacaactgtacacaaagccagattcacttcaataatggatgtgttcataagaagctagaagagcattcagcttttctctgtgtcctgtttcatgtctgcaaaacagtttttaaaccacgatcatgctagaagtctcaaaagctagaagtggctgacacatctctgaacctaagaggggctagttatgaacctgtgatctctgtagatactctgaggccatacacccagtgacagaatttaaaagcctcaccaaggcacaaagctaggtaacatctgtacaggcagccacagtgagacctgtcatctttaaagttgtcaagggaggatgtgttctatagataataaccccaatttctgttctctgtcacctttcccttagggacatctcagaaggcaccatagctatcattagactgatccccttccctctctagtgttacagccaaagcatcaagtccaggccttgtccctaatgccccttagcactcttaggacaaagctagaaaacgtgggtaaacttcgctaaagcctggggatagcaaaagggaaataaaagatattctgatttatggtaggagcttagtgcgcagcccctggcttgctgacatgaaagacacaggctatctttccccagcctcccaggagtccctcaagcatagctagaccagacgtcagaccctttcctctgttgcagcacacctgagaggcgctgtatccatgcttgactcagcacctgctacattaggtgcctactgtctccatcacaggctagaatacaaatggaaatgac

SEQ ID NO: 95330 - DNA, 139902 bp, Homo sapiens
  misc_feature (1)...(139902): n = A,T,C or G
aaacaaacaaccccattaaaaagtgggaaaggacatgaacagacactgtcaaaagaaaacactcatgtggccaacaaacatatgaaaaaagctcgacatcactgaccattagagaaatgcaaatcaggctgggcatggtggctcaatgcctgtaatcccagcactttgggaggccgaggcaggtgaggccaggaggtcaggagttcaaggccagcctggctaacatggtgaaacactgtctctactaaaaatacaaaaattagctgggtgtggtggctcatgcctgtagtcctagctactcaggatactgaggcaggagaattgtttgaaccagggaggtggagattgcagtgacccgagattacgccactgcactccaggctaggtgatagagcaagacgctgtctcagggaaaaaaaaaaagaagagagaaatgcaaatcaaaaccacatgagataccatctctcacaagtcagaatggcaatttcttaaaaagtcaagaaacaacagatgctggtgaggttgtggagaaataagaattcttttgtactgttggtgggaatgtaaattagttcaaccattgtggaagacagtgtggcaattcctcaaagatctagaaccagaaataccatttgacccagcaatcccattaccgggtatatacccaaaggaatataaatcattctattacaaagatacttgcagcacatgtatattcattgcagcactattctcaatagcaaagacatgtaatcaacccatatgcccaacaatgataggctggataaagaaaatgtggttcatatacaccatggaatattatgcagccataaaaaggaatgagatcatgtcctttgcagggatatggatggagttggaagccattatcctcagcaaacaaatgcaggaacagaaaaccaaacaccacatgttctcacttacaggtgggagctgaacaatgagaacatgtggacacaggaaggggaacaactcacactggggcctgttgggggtggggttgggggagggagagcattaggaaaaatagttaacgtatgctaggcttaatacctaggtgatgggttgataggtgccacaaaccacacgtttacctatgtaacaaacctgcacatcctgcacatgtacctgagaacctaaaaattaaaataaaaaaattttaaaaagtgacagtaattaagactgtgtggtactggtataaggataggtatgtagatgtgtagatcaatgggacagaattgagagtccagaaataaacccatacatttatggtcgattggtttttgacaatgtgccagaacaattcaatggggaaagaattgttttttcagcaaatggtgtggggacaagtggttatccacacgcagaaaaattacataggacctctatttctcactctttacaaaaactaattcagcatgaatcatagatcaaatgtaatagccaaaactatgaaactctgagaagaaaacataaggttaaatctttctgaccttggattaggcaaagccttcttagatacaatatgaaaagcacaagaaagtaggtaaattagacttaatcaaaattaaaaacttttgtgctttaaagtacatcaagaagaaagtgaaaaggcaacccrcaaaataggggagaatattgcagatcatgtaaataataagggacttgtaatccagaatatatacagagctcttacaattcaaaaacaaacaaaaaataccaattaaaaatgggtgaagtgtttaaataaacatttctcccaagaagatgtacaaattgctaaataagcacacgaaaagatgttcaacattattagacattgggaaaaggaagtcaaaaccacagtgagatacctattcatacccaaatggatttgctttaactaaaaagacagacaatgacagtgttggtgaggatgtggagaaatgtagatctttcattcattactggggtgaatgcaaggccttgcgaccactttggaaaacaatttggcagttcctcaaaatgttaaatatagagttaccacataagccagcaattctactcctaggtatctactcaaataacagaaatgaaacctacgatcgcacgaagacttgcacacaaatgtctaaaaaattgaaacaatctgcatgcccattaactggtaagcagataagcaaaatatggtacatcatacaatggaatattattcagccataaaaaggaatgaagtatagatacatgttgcaacatagataaaccttgaaaactttatgctaagtgaaagaagtcatccacaaaaggccacatattgtatgattacatttattaaagaaatctcctggataggcaaatcttgagatataaaaaaattagtatttgcctagggcaggggggtttttggagaggaagaaagtgactactaatggataagaggtttctttttagagtgacgaaaatgggctaaaattgattgtggtgatatttgtatagtgctgtgaatatactaaaaaccattgaattgtaccttttaaatgggtgagttacatggtatgtgaattacagcttaacaaagctgttaaattttctaaaaagaaaggcaacttcctaaattgaccaaatgttttcgagtggggcaataaatctcatacatcattgcaatttcaggaaccaagctgcagtatagctgtgttttctggtgccaggtctcttgcaaggctgcagtgaaggtgttggctgctaacatttcaaagctcagctgggctcactttcaggctcacccatgcagttgtccacatttggttctttgaagcctgttggactaagggcttcaattttctactagttgttcacttggggctattcttagcttggtcacatcagcctctttatggttaacaacacagcaccttgcttcatcagagtgagcaagtgagaagaacctgggataatgcaagcaaggcagcttgcattgtaacctgatctcagaagtgacatccctttacttttgccattttctggtccttataggaacatcagtagatctagcccacactcaagaagagaggatttcacaaggatatgagtcattgggaggtggtgatcattaagagccatttcagaagctgtctaccacatggaccatatttttaaaatgtcaaattgtggaggttgtccttatggggccgatggtgcaatgcaatgaaattaacttacctgaaaaatctgaagcttggttgccatgagtattcaggacactggtatggagtgtaagtgaaaaccagcatgattgatgatagatgtgctttggcaataccaaagcaatcagaagttgttaggacagttggttagagcactttgtgaaggggtcatgacgtcactactcagtgttaccattaggccaaactaggccagcttcttgcaaatgcctattgttcccaaggagactgtgtgaaagaatggaaaaaccattcttccattaaactaataatttattcagtcagctataaaaacttctcaaagtccttgtgtaactgaaggtaggctggcagcataatcttcacttgggggtggtaagttttcatgacaaatattttagaataggattttctttgactagaactcttctacttctgtgggcaaatataagttcaattcatacttggaaagaaaagattggaaatgatggtgtttatagcattccatatatttcagacagaagaaattcctttgaaacgtcatatattttctaccttctgatgattcctaagtggtagattcctagtttacatctccaaacatgtaatcctattctagtgaagaattgaacattaacttaataaatacattattaatattattttctcctgtccatatagattcatctaacttccccttatgtcatttctaaataacaaatctgaagctcaatttcaaagaaattacaaagtagctcaaaggttatctttcttatgtcataatacagcagtccccaacccttttggtaccaggggccagtttcgaggaagacaattcttccacagacagggtgggaggtgatggggctggtttcaggatgacactgttccacctcagctcatcaggcattagattctcatacagagtgtgcaacctagatcccttgcaatgtgcagttcacgatagggttcatgcttctgtgaaaatctactaccgctgctgatctgacaggaggcagagtttaggcggtaatggggcttgcccgccgctcacctcctgctgtgcagccgggttcctaacaggccatggaccacaccagtctgtggcccagggtatggggaccccaggtatgttatataattaggtaactgagatcaccgctatggtctgtgtctccccaaaattcctgtgttgaaatcctaactcccaaggtgatgatattaggaggtgggacctttgggaaatgatcaggtcatgagggtggagctctcatgaatgaaattaatgtccttatgaaagagaccccagagagctctctcacctctccaccatgtgaagctacaatgagaagacagcagtttgcaacctgggacaatccttcccagaacctcaccatgatagcaccccaattctgaactttcaacctccagaactgtgagaaaatgactttctgttgtttataagccacccagtctacagcactgttacaggagcctgaatggaccaagaaaaatctccgatagaagtgttacagaaataatgttaagagagataatgccgggagtacctgcctcttctcttctccctactccaggcaaattgtctggtaatgttgtgatgctcggagaacgccagcccaggtgcctgtgaagcagtcccctctgctcactgcactgttcctgattttgttccataactttgtgcctctaggaaaagaggagagcctcccgaaatctgatgagactcgctgtatcacgccagtctgtggcttaggtgatacagaaaggaaatgcgaagatcaggcctcactgccagctttgctcagttacacagaaaacatgctgtttcagcttttgggagtttcttagtacacgatcggtttctttttctcttttatgaaagtttttccccttagatttgctttcaaaacaacagactttcacttctggctaagacagaatgagtgacctagtacaatctttgacactgttattatatatctttattcataatcaatgcatgattttgattattctgactttaattttacgagtaaaaatgggttggttataaatccctttcaaagaattttttttttttctttttgagacggagttttgctttttctgcccaggctggagtacaatggtgcggtcttggctcactgcaacctctgcctcctgggttcaagtgattttcctacctcagcctcccaagcagctgggattacaggcatgcgccaccacacccagctaattttttgtatttttagtagagatggggtttcaccatgttggtcagctggtctcgaactccagacctcaggtgatccactggcctcggcctcccaaagtgctgggattacaggagtgagccaccgcgcccggcccctttcattgctttttaaggaaaacatgctatcatatatacttcacctccagggcagtacattcttactttaaggcaaagacagttgctgaggcctggactaggggaaaatttgggctccagatgggactgttggataaaataccagacgtcctgtaaatgtgaattttagataaacaacgaataactttttagtataaaagtaaatactgcaatggaatttattatttgctaaatgtgcaaccctaggttaagagagcttttcagacccacttctcagcccgagttttctatttaaaatcagaataagaacgcctgcttcatggagctgttaaatccaaatggaaattaatttgaaagcgcgaaatcaaacttttcaaaagaatgacggttacaataagagcgttttggcctctgctagctgcttccgggcggaggtcctcggcctcccctaggcgaggcactaggtctgggggcggcgggtcttagcgtgcccgccacgctcgccgcctcccacctgccctggctgkctsgggcccgacccttgcgtcgctccggggcccaagttacggactcgggaatccagttgtccgcaccgaacaagccccgccgcagcgcccgcccctcctcttgctgctttggagtctcccggcttccgccttccgcagcagtcacgtgcctccgatcacgtgaccggcgcctctgtcattctactgcggccgccctggcttccttctacctgtgcggccctcaacgtctccttggtgcgggacccgcttcactttcggctcccggagtctccctccactgctcagacctctggacctgacaggagacgcctacttggctctgacgcggcgccccagcccggctgtgtccccggcgccccggaccaccctccctgccggctttgggtgcgttgtggggtcccgaggattcgcgaggtaaggccgccctcgcgttgtttggtctcaggctgcagaccaggtcaggcgactcttgcagtttctccagcttgcctggtgcgtgctggtgtctcgccgcttggtcctctcctgttcttcggcccccggttgccagattgcttttcttccaggcctcaaccaggtttattaagcgaaattctggagcctttctcgcagggggaagaaacgtcaggggcgggcaggagagtggagggggaggggtaaaaagtataccttctccaggactgggccacggccctggatcgctgggggtgcgagtagttcagggacttaggtaattgtctagagacaccttgagctacgccaggacgggccgctgaggctgagcctccttggctgcagagttccagcctggcccagttgaagcctgttttttcctgggccctgtcgttcgcgctgcccagggttgtttatacagcaaatcttcagatacagagattaagttccaaattgattaagatcgttggaaacccggaatataattttgggtaggattttaacttctttgtggccatggccgtgaatttatgttttgcaagtggcaacctgtattttgctttgtgttaaaatcagtcgtttgtatctggaagtttaggagtgagaattacatagaatttcattattgtaggttcttgtcgtccagccagaccgccattgttggcttacctaaattgtaatatgtatttgttctaaaactttctctccgaattttgattttgcaaatactrtgaattttgtttgaaaaggaaagcactgtcttctaagaaattatgttcccactttgtgtattttaatttgagtaattttcgaaaggacttagaatttttaatgtgccacttcaaaatgatgcttagtaaatgtttataaaactagccttatccgtactattcatattcttattgtttctctatgagaaaagttaaccacaattgtataaatttacaatttttcccatatttatacctattctatttaatcatgatttctgatttcagtatattaggtgattgctttaaaaatcttactgcagtgttagtgccaataatgaaaaaaawttttctagaaaagcaaaagcctaaagaactcttttatggagcagtggacaatatttgaaatataatgatactttcagacttaggacatttaatatttgagttgaatgcctggggagattaaagtgatcaygatattcataatcataatattaatagttgtaaaaaaaagaaacacctcgtattctgtttttaccttgcatcaaaattgaagatttgttgaaagacattcargattacgaagtttagatgaccaaaatggatatccgaggtgctgtggatgctgctgtccccaccaatattattgctgccaaggctgcagaagttcgtgcaaacaaagtcaactggcaatcctatcttcagtaagtaccaatttgctgtgaatcatggacagtcatatgcttttgcatcagactttttcatggtcatgcttctatgagagaaatacagggaaaatactgaaaaatgtggaagaaacacttcctcttcagaataattagctgtcttagggagttaagtgtagtggggtggaaacagcttggcgccctagtggggaagcagagcggcttatggtgcttttgaccttctctggctgcctggggaagtacttttggaataagtgggaaacataggaggaatgtccttgggctaacggagggaggaaggggatgaggggcaaaacctgctagactggtctgatatgccctggcaatcagcatgggggcaggtggcctttttagagtggtgcatacaactaataagaagcacagatatttgagttgagagacttggatttgagttttggttcttgctattagtttggtgatcttaagcaaatcacttaacttctctgaggctcaataaagtaaaatgtgaaatggggagacataccccacaggcttgttgctgaaataatgtatttattagcacagtagaatacaagcattagtatgttgaatacaatacattttagttcccccttctttcttgtatgtattaatatttaatgtgctgatgtttcagtattttgtatttatctataaagtgagcattcatgtattcttgaccatattttattgacttcatatttattttggtatatttataactgagttaccaaggaattcagttcagatttgcatatgcattttgaaaaacaaattgaggaatctagttttatattagtgttaattttatattagtattaatagtttgtgttgttgtaggagggatctataatgtacaaaaatgatcctttaatttctgttaatttaatcactcatcaaacatttattgattacctgccaagtttgaggcatttttccaggctttgaggctacaaaaattccatacagagtactgtccctgaaggaactaaaactctagtagggaagtcagatgtattaatagatcattttaattcactatttttttttttttttgagacagagtctcactctgttgcccaggctggagtacagtggggcagtcttggctcactgcatcctccgcctcccgggttcaagcagttctccttcctcagcctcccgagtagctgggattacaggcacctgacaccttgcccgcctaatttttttgtatttttagtagagacagggtttcaacatgttggccaggctggtctcgaactcctgacctcgtgatctgcccctcttggcctcccaaagtgctgggattacaggcgtgagccaccgtgcccggctctaattcagtatgttaactgtggcaatagaaagatgcacagggtctggcaggtgcacataaaaaagacaagtaattctaccccttggaaattttcctgaaggggctggtccctgaactgagtttttgaggatgatgggtatttagccatgtggcaagtaggagcagccttgggaatagaacagataatgtgagcaaaggcagggaagcaaaaacagcacactgggtgggagtcatacatgttttggaggcaggcaatgcagagagctgaggctagagaggcagccaggggccgatcgtgaagatgctgtgtgtgggtgtgtggttggaaggagtttggacttgatcctatcagtcagtgcttttcaagctgatttttaagctgtgaagcccatgattgatatgaagttagcatgtaaaacagatgaaaatgatagaatggaggtgggagtgtgtgtcccagagccctctttttgagaccattcaccattttccaaggagctgtaggtgttggaaaccaatgaatcttgtagccgggagttagaagaccatatctgcctcttgattgaattgttctactagcagcatgaagggtgagtttgtaggtgataagtctagaggtagagagaagctatagcagtaaccaaggtattggaatagatagaattggttagattgagagagtcttagtgattgatttggtgtgtgggggtgaaagagaagtcttggatgacttctggattcctactttaaggaactgggttattgtggggccactgactgaaggacaggaggaggggagacttgctgatgttttctctgttcatcagtgtttgtgtaattgtttaaattccctgtgaaattaggattctgagctctgtttcctaatttctttagtccagagtgcatttagactagaggacagggagttttatgtttataaagcctggatctgtttatagcctacatagaataatattgttgatcataaagcactggtggactggccagagctccgcctaacgttggcatttggaatgtttgtagttacatggagcttttaaaattgctttatttctgttcttcgttacccatggtctatgacatgttgtgttttcccgttttcctatatatctgtcttttgttctgatgtccatctcacaaatttcttttgtaaaacccctccactccgtaggcctgtgggcaaatgttcaccaaatgttaactgtgggcctgttgagcctgttgatgtgtgggtgctggtgggtgtgaaatgtgtctcatataaaagagcttacagattgttgggggctggaaccaacacatgaagaatcagtgaatcttctatcacattctgtactgagataataagacctgtggaagcgtcccccagtgtcgagagcccaatatgcttttgttcttcacaaattaatatgttatgaaaatacagtatttgaaacatgtatttatatttgattaagcttttttcttaataaatagacatacataaatgaatgggtatggctgtgttctagtcaaactggaatctggtaaaactaccttgaggatacaagaattataaaatgccatccttgctcatgagtttaaatctcatgaggaaacagacttttatcaaattaaatagcaaattgtgctaaatgttaagatagagaaatatataaatatataaagtgtatatatatttacaacaaaaggaaatacacaacaaaaagtgggagcaaataaatgctgggagtattgggggaattttcacagaacgcataaagacactcacaggtggccaggcgcggtggctcacgcctgtaatcccagccctttgcgaggccgaggtgggtggatcacctgaggtcaggagtttgagaccagcctggccaacatggtgaagcctcatctctactaaaaaattagccgtgtgtggtggcaggtgcctgtaatcccagctacttgggaggctgaggcaggagaatcgcttgaacctaggaggtggaggttgcagtgagccgaggttgcaccactgcactccagcctgggcaatagagcaagactctgactcaaagaaaaaaaaaaaaagacagtaacaggagttgtccaggccgaggaacacctggagttatctaggaagggaggtccaggcagggagctgaggcctgggaggacatgcagtgcttgggagcttcaggtagttcagtgtggctctctccaggcttcttcatttaccagcttcggaggccaaaaaccttggggccatccttgctgcttcccttttgctcacagtccatgtccagcccatcaacacattcttccagctctacgtccaaaagatgcctcgaatctgagtgcgatcctgtgtctgcggttcctgcctcgtgcatgttgtgttccccttgcatgtgctctgttgttattgcctgttgcctgctgtctgtctctgctatccttgctgcctcagtaggagcaattcttcacagaactgcgagagtgatttcaaaaaaatacaagtctgatcatgccccctcgctcacagctctctagctcccgccttcttgatctttctcacatagcaaacctcagctccttggacctgtgtatctgtctctccagaagttccacccttagattctttggcctcttcattcacttcatttgtgtggctgtataggtgatctcacaagccccctacccggactggttttttttttttttccatagcatttacagccttagcattataacatgtgtgtgtgttttcaagattatttgtttttgtatttgcgtattttctgttttcctcactggagtgcaggctgaaaagaggggtccctatttattgatgtgtcaactgttcttacaggtgcctggcatgtagtaggctgccagttaatattagttgactaaattatgaatggagtattgtgcttatcaggaattggtggagatgagtatttggaaaaggaagtaacatgcttggtaactaacatcctatttaacattattttcatagaaatacagtgacataggtttttctatcctattcactctctcttttttttttttatgagatggagtttcactcttgtcgcccaggctggagtgcaatggtgcgttcttggctcactgcaacctccgcctcttgggttcaagtgattctcctgcctcagcctcccgagtagctgggattacaggcacctgccacctcgcctggctaatttttgtatttttagtggagacagagtttcaccatgttggccaggctggtctcgaactcttgacctcaggtgatccacccggctctgtctcccaaagtgctgggattacaggcatgagccaccatgcccagcttctatcctattctcttttaaagatgagtagataactgttctgatgggttaagtaacatgtgcatgattatataggttttagttagtcaattgattttaaatatttttactgaatgcctctgcgtaagtgctaggtagaactcacagtccaagggaataatatgaccccatatgtacttgagaaggccgcctggtagtaggtaagaagatggttttgaagaaggttgaattggatgcggggaaatccactggtggaaggttgtcctagtgctgagctactccagaggcagggaagtagagaggagagtagttttaaggggaagattgttaggtctggggcctgattagctgtgggtcattctagaagataccagagccccgaacctgctggattatggaaatgtcaaaggaagacccagagagaaaataacttaaacaaggaaagaaaaaggttagggagtggctagacaaataagaaacagttattttaatggaaaagaaagctgcaaaattataaggttaccaagtgtagccttcatggtataccttcttcatggtagaaaaaccaccaccttttgacatgattttcttcacagaggttatgacatccctttacatatcagcatagcaaaatttaggggtaaaattatttttatctaggaagttcaggtttatcagtgtgctcaacatttcatttattttggggccagatctagactggatgaccttgttattttagtctaccccagggtgcagagtgcattttttcctgaccggtacgtgaagtgcttagccagaatggaaagtgggcaaagtgtctgtttttgcttccaacttctagcctttgggattaacaatcttagttctgcgcctgtagggtgtggagtgccactgccatctgtgggaggatatgagtggggaccgggggaaataatgccagagttcagcgcagggggtgtagtgagaaatgaagagagcttttcatagtagctgaggcacaggaggcagtgaagatgagtgacttgagtgggatgagaagaatctggaagctaaggaagagagtgtcaagatgtagtcatagtgtcacctgcctaagagagatctagaaagacagaattctcctttgggttggtaattaagaaattgttgaaaaaaataaatgcatgagaatagtttaaaatgttaaaaaatgagcatgtgtgaaaacaaagttacagtgcttaaaacagtgtgaaactgatgtaagaagacagaatagtgaattacaaagtccagaagcaaatttgaactatacaaaacaatttggcatatagcagtagtatgtacaaaacccagaagggacactgatagatttttgaatatgtaataatcaaggtcttctttggaagagggtggggttaagggtagaagtagtaggacrtatgcaagttcaggtcccttctcttggggaggggacagttctgagtgcctcaccttcccaggctctcctgtgggctcagggaaagctgtcctgggttctttgcttgaatcctgctgggcttttttgcttcagtgtcctgagcccttcatgctatccctggcttctcctgggagctcttctttcataaatcacttgtacatgaatcttcgtctcagggcccagctctgggagcctgacccgaggcagctctgaaagtgggccatccttctataactatgctttttttttgtttgagacagggtctcactctgtcacacaaactggagtgcagtgacacaatttcagcccactgcaacttctgcctcctgggttcaagtgatcctcgtgcctcagcctcccgagtagctgggactacaggagtgtgccaccacacccaacttattttgttgttttattttttgtagagatggggatctcacggtgttgcccaggcttgtcttaaactcctgtgcccaaggggtccccccatcttggcctctcaaagtgctgggattacaggcatgagccactgcacctagcctaactgtgcatagtgggaacctgctttacattcagtgtttctctgagtgggttttgagaacaccaattcctcaacatatttggggtcaggggaggagggacaattttttaaannnnnnnnnnnnnnnnnnnnaaactatattggggccaggcgcagtggctcatgcctgtaatcccagcactttgggaggctgaggcaggtggatcacgagatcaggagttcgagagcagcccggccaatatggtgaaaccccgtttctactaaaaataaaaaaattagctgggcgtggtggcatgggcctgtagtcccagctactcgggaggctgaggcaggagaatggcttgaacccaggaggcagaggttgcattgagctgagatcgtgccactgcactccagcctggcaacagagtgagactctgtctcaaaaacaaacaaacaaaaaaccaaaaaaactatattggtgttgtttgaacaggaaaatagattacaaaaatttttaattttacacttgcttttacccatgttctaatatacagcgagtgctttttcttatattttttcatttaatctgcataaccacctagtgggctagggcaggtagtatcatagttgctgttttactggtgtgaatagtggtcagatgaatagtgacttgctaagctttcacacctggaactggaactcttccccatattgactcaaattctctgcttttcctaccatactggtggcttaaaggagctgacttgaatgaatcctgaagtgcccagagtcttacagggggctagcaggtctgttctgctgacacatcttttagacaaggaagggtctgtatttagagattaggatgggggtttgctatattgtatgattgagtccctgaggagtggagaagttgggaaggttgagctgtgtttcttctacctccagagatagtcttaycattttcaaattcagcagcatcaccaccggggaaagtgacagtgggatatcatcttcactggggatgacagggaagatgacaggaacatgatgctgaatttgaaaatggtaagactatctctggaggtagaagacagtggaaatgattgggagggagggaagatgggactctcgattgaatctctcacaggaaggagtttggaaatcaaaagcaagatttcagtgattgagtgctggggaggagccttgaagggcgaagagccagtgatgaagcgacccctggaagagatggaggaaaataggagagtgtggggtcaggatggagagttattttccagagaggaggaaaatcagttttgttttttttttttctgtctggagggaaagaatgtactagagaaaaatggtcgtagaaattcatataaagtggctttggacttgataaattagatagccatgtgaattgtttggcttgagagggggaataagggtgagacactgggtaatgctgagaggtgacattttactgagtgcctaccatttgccacatgctactaaccaccttatgtgaatttaattttatcctcagtacagccccttagaggcaatgcgattattgttcgcattttgcagataaattaactcaggttccagggagttcacactgtcttatttgtggagaaactaagcattgaatccaggtctgtctgatgccagggcccttgcgtcagcccttgtggtttgctgccaaggagagaagagaaggactgaaaattcctctatcgcttgcttacatattcaactcttactgaacaaaacatcttattcttactttctaggggacagatgatttctgctgaagattgtgagtttattcagaggtttgaaatgaaacgaagccctgaagagaagcaagagatgcttcaaactgaaggcagccaggtgatsaataaacattatataatgaacacttccccgtgtcatccaaaagtttagaaaaatcttagtgattataagtgacttccagttttcttgctaatttggaaagaacgttatattgagcatgtttaccttcatccttttctgtatttctgaatattttcttagaatatacacctggaagacaaatttctggaaaagaagttactgtttcagagtatgttaagttttaaaagttgcttaacttttctttttttaagagaattttttccacttggtattcttactagtaatgtttgaaatacctaatataattgaaaatgtttgaatttgctaagttaaaagggatatcactttgatgacatgggattacattattttcctgttgatttattaagtatttatatgtcctttgaaatttttttggcggtggcattctttttattttaatatataaggttttgttactttttgataaacagtctttttacatacraaatttattactgtttgccatatttatagcaaacatagtttccttttttactatttatctttgaagggttgtggagttttttcatatacagtggtttaaaatgtttagttacatatattgatgttttacattctttcatggtaagtttattgtagaaaaataaaatactattaagcaaaagaaaaaagttattctacctaatatttctctgttcaaggtgacttgtttacacttagcgtatacctctctagatatttttctgtgcataaaataacttatacacttatttctacaaatgtgaactttttacaaaaaggggtgatatgtacatatctttgttcttttcatttaactgtatattcttcccttccctactatgcctgtaaagatatttctgtggtatttaaaataattaatttattattatttcccatttatggaaagttccgttgtgtaattttccatttaatggatgaaccataatgatctaaactaattctatactgttgcatattttggctacttccttttttttctgttttgaggcgaacagttagtaatctcataattaattcgagaagtgcaattatctggctgggtgcagtggctcacacttgtaatcccagtactttgggagactgaggcgggcagatcacttgaggtcaggagttcgagaccagcctggccaacatggtaaaacttcgtctctactaaaaatacaaaaaaaaaaaaaaaaaaaaaaagagtgtaattattgattaaactatttgagcgtgtgagagttttgatatgatgaaaatgctgtcttgatagattgtaccagtttgcagatcctgccagcagtatatgagagggcccatgcccctgctccagcaccccctctgggtctagccattcatcttttggtcattttgataggtgaaagatagtatcttaacgtaatagtgttacacattttcagatggtttttggcaccttttgtatccatatcgattgcttctatactgtcatgcactgactacataaagatgttttggtaagtgttggactgtgtatgtaatagcggtcttgtaagattatactaccatgtttttactgcacgttttctatgtttatgtttagacacacacatacttactattgtgttacagttgcctatagtattcagtatagttacagactgtacaggtgtggagccataggttctaccatatagcctaggtatgtagtagacactaccatctgggtttgtgtaagtacactctaggatgttcacacaacaaggaaattgcctaatgatgaatttctcagaactttccccattgttaagtgacacatggctgtatgttttttatttacttttctatggaagtgtttataatcttattgatttgtcagtttcctttatgttttaagtataccagctttgtgcatgccatatttcctcagcttgtttgttgaatttttaacttggtttatggggtctttgccatattgaagtttaagttgtgcgatgaaatctagttcttcctttcctttgtgatgtctgctgttggtgtcatcctttgaaaaagcttccccaccccaaccgcatgtgcaatggaacatgtagctgattcactgttttttcagcacatacacactgagtccctgccatgtgcctggtgagactggggatgtgtgttaataagacaagacttttcccttaaggagttaggagttaaaacagccctttcttttctttttttctcatttttttttaaacctgtttcttagtaagtgtgcaaaaacagttctttcttaatagcagtgtctggtgtgatgggccttttatggggcagttgccaggaagctttttatccaaacaaaatggcagtatatctgaaaaagagttctgacagaaataccgtgggcaacttatatctttttttttttaattttgcttaaataggttaaagtgtttccactttagtgttttgattaaaaaacccaactatttgttactgttaactgtttacattcagtatggtgagtgggctgtctatccatggaagacatgattcataggtaggcgtaagttctaggataagtatgattttgataaggtctccatttttttatagcatggtttttatcacatgctgtttgttacattggggatttattgaatgagtgaataccaagtgaaatacactttaatttatacatccttaaggkggggaagtttttcaatgtatgactccaaacctattactgaatgctgttgcatacttaaaactatgttttttggggggtgatttaagggattttatagagtgttttgatttgtaccctatttgatttatatgctgagttwagaacttggccccataataaggttcaattctgctgcctatcggggggcctcattggctgaaggagcccatatacaaattggtctgattcttacaacagtcatggggaagttggtaggtaatatattgttggctgcagtttttattgaattatggagaggttgtcatgtagttgatacactgtagaatggagactagtcagggccttctgattccaatctctggtactcttgttgctcttgtcttctgttccctttaagtacaacaaataaaatactcaaaaccaattgtaatttttgattgcctatataactttatgcygtcgtcggtaatcaagagttattagtggctaagtatatctatttaaaaatagtaaacattctgaaacttatcactagaaatgttcacaagctgatacaagccatagtaaggtcctctcatacttcatcacaatatttataaaaggtatatgttttctgtaagtaaaatttgttagtaatatttgtatcctaatttatgaaagagagacaatgttttactgaagttccattgaaatgtgtctgcaaataaaaacaataactttaatttcatttttttttttagtgtgctaaaacatttataaatctgatgactcatatctgcaaagaacagaccgttcagtatatactaactatggtggatgatatgctgcaggtaggtatattctttacttaacacatttggtgacttcatttttttgcatacctcacagtagcagcatttttggtgagatttcacttagaacatttgttctcttctagagcataataatatatttttctcatttatgtgggttgtaatttgctaatagagctaaagacagagatacccacacacaggctgtttttgtttttcagaacaccaagtaatcaatatgtatatttttctgagatacctcagagttttttgttgaacgccagcaaagcttgctgtatcacctgaggctttctggatgctctgtgtacttatggatgatatggctccttctcattcaatcagtcaacacatttcagtgctcatatgttctaggccagtgccgggccctggaggttcggtgcttttgttccttttgggaacagttttgcttatcatcgaaaacgtttccagttgcatacagtttctgtttactgcgttaccatccctgaacccaattatgaataaaggagaggcctcctttattcatatttatgtattttacactagagtataatctaggcttagatggttggtatgtagagcagttcttatgagatcggccttccagctgctgagtgtctcaggagacttgaaggaaagagtcagtctgggtgtttagggagggttgttctattaacttataaggaaaaaaacatttattgatggcctaattttcaccaagcactgtactattattgataatacaaaggttgggcagaatggtgctgtcttcctaggggtcatcatgtcctttataggaatctagtgattttataatgtgaggaaggatcaatatcaggactgtcttgagaatgacctcagtctctctgagcactttttcatgtaaaacagtaaagtttagaaaaatgtgaatgttatgatctgccatggttatcttgttactgtatgggactgtacctagaatgagggagctgtgagtcggcatgcggaccgtggttgctcatatccttaattactgtccatatgctcatatctataaattaacaccatgacatgctggtagctcccattacatttcagcgcagcaccacagggttctttgtctctcctttccgtatgtgtacctcttctgtaacagtgagattgtgagttcctcttatcctcagtgtgtttacttgtttgttctaccctaaaatacacagaaaatagtttcagagttgtggacccatacaactcaattatcgaggaaagcagtgtggtgattcttcaaagagctaaaaacagaactaccatttgacccagcaatcccattgttgggtagatactcaaaggaatagaaatcgtcctactgtaaagaccacacacacgtgtttgttcgttgcagcgccattcacattagcaaagacatggaatcaatctaaatgcccatcaatggcagattggataaagaaaacgtacatatactccatggaatactatacggccataaaacagaatgagagcatgtcctttgcaggaacatggatggagctggaggtctttatccttagtaaactaacacaggaactgaacaccaaataccacatgttttcaattataagtgggagctaaatgatgagaacacatggacacaaagaggggaactgcagaagctggggtctactcaagggtggagggtggggggagagagaggatcagaaaaaaataactattgggtactaggcttagtacctggattatgaaataatctgtacaacatacccccttgacatgagtttaccaatataacacaccggcacatgtacccctgaacctaaaatacgagttgaaaaaaacacatacacacaaaaaacaagtcttttacctggagttcagtatttgtttgcagttttttgttttaaactcagggtatatagtcagaatactgtgttcaagtttcagagtgattatttttcatgaaatactgtaagagtcatttgtttctgttgtattctattttagttttttcctcatccttgtgcatttcattattattatttttattttatttatttttttgagacaggatcttgctctgttacccatgctggagtgtagtggcgtgatctcggctcgctgcaacctctgccccctgggttcaagtgattctcctgcctcagcctcccgagaaactgggattacaggtgcctgtcaccatgcctggctaatttttgtgtttttagtagagacgaggtttcaccatgttggccaggctggtctcaaaactcctgaccttaggtgatctgcccacctcggcctcccaaagtgctgggattacaggagtgagccaccatgcccagcctgcattttatttttgagtatgtaaaacattaacatgtttccaaaagtcaaaactatgcagaaaggtatactcagagaaatgtcactaatcctagcccattcccacctccctctcgtaggtgaccaatatcatagttttttttttttttgagacagaattccgttctgtcctccaggctggagtgcagtggtgcaacccccgctcaccgcaacctctgcctcctgggttcaagcaattctcctgcctctgcctccagagtaactgggatacaggcacccggcatcattcctggctaatttttatatttttttttttagtagagacggggttttaccatgttggcgaaggtggtcttgaactcctgaccttaagtgatctgcctgcctcggcctcccaaagtgctgggattacaagtgtgagccactgcgctcagcccaatatcattggtttttaattttttttttctgtgaacatagacaggcagacacatgtatatttttttatttccccctcttatttctataaaacacttattagatataatctcttattttttgcttgtttcacttaacagaatatgccagaaatcattacgtgtcagttcatagagatctcatctccctgttctgtttttgacagctacatggtaccccattagtggatgtaccatagttcactcagcctctgatgtaatgatggacattgtggttggttccaaattttagaattagaaatcatgaagcaaagaataaccttgtgcaaatatatttttgtgttgttgggtgtatatttcatggtaaattcttagaaatgggattgctggataagaggtaactccatatgtagttttttttgttaagatattgccagacattccattttgcattttcatcagcagggtgtgagtgcctggttccctgtaaccttctcaacagagggcattgtcaagctgttacatttttgcctatcagaatggtgtccgaggttgaacatctttagatgaccttaaaggttgcttttacatttttttccctgaattatttgctcatgtctttgcccattttaaggagttctttatatattaggcatatatctctgaacaaagtgcaaatattttctcccagtttgttatttacctttttgtcttagcttataacatttttcacagggtaaaacaatttatttttattttttatatagtctaatttataaaaaaaaatttttttaatctagattttgagtaatagaaagcttttccttatacccaagtttacagtggaattcaccaaggtttttttctagtgcttgtatagtttcatctttagttagacatttggcctgcttagagttggttcttgtctatagtgtaaggtatgtgtctaattttatgttttccaaatggccattcagttgttctagcaccatttattaaaatgtcagtctttgccatagtggttggagatgctgcctttaacatcaaacctccctatataactagatttatttctgtaccttttatactttgcttctggaatgcctgtgtattcatgctccagcaccacccagtttaatgatagaggatcttatggctagttcccttcgcagttttttttttcccccagtatttacctaggttttcttgaatgttgttttttttgtatgaaatggaatgtcagcttatttgatctatgaaaaagtttgttggtgtttttactaagttgtgttaaatctgtaagttactatttaaaaaaaaaaatcaaaacaaggcctggcagtagctcatgcctgtaatcctagcaccttgggaggctgaggtgggaggatcgcttgaagccaggagtttgaaaccagcctgggcaacatagtgagaccctgtctctatttaaaaaactaataataaatttataagttaacttagggagaaatgacatcattatattactgaatttttctgtccaaggacaaggtatacctttccgtttgttaggtgtgtctgcgtcttcaggagtgttgtaattttcacataatggttttgcaacatttcttgttaagtttataccttcatattttatcttaattatactgttaaaaacagcatttctcttccattttatctctgaacttttgtttgttaatgtatatgaaagtcattgatctctgtatattttctgttttggtaccttagtgaattcttttatttgaattaattttgtgattgaatttttctctaatttataaaagttgtaaattataaattttaattaaaattttataattttctatttttgcaaaaacagataattttacttctttttcaattcttatgggttataaaacagataatttcacttttttaattcttatggcttataagaacttgtcaattcttagtttttgagtgctattattaagaataggtgttgagttttgtcaaaggctgttattttctgggcatctacatagataattgaatgactttttttcccctctccttagatatatcaatatagtgaattatagtaatggattttataatactgaaccaaccttgcattcgaggttaaatcccacttggtcatgttgtcatattttcttgatatgatattgaattctcttttctgttatgtaggatttttgcctcagtgttcatatgtgtaattggtttacaattttattttattttttgttttcttcatttggtttaggtatcagcattatacttgcttgataaaaaggatttggaggtttttctttatttgctatgctttgcaacaatttatttagcattaggactacaagggctaagttttggtaaaattcccttgtgaatacatctgaacctgttgtttttggtggggtaattatttgatagctttctctatgtcttctacagaaattgttcatttgaagctttctatctcaaatggtggtaattttggtaatctgtattttctctggaaattattgtattgaagcttttacatttactttcatagaagactaatcttattaaatcttatgcttcaaatttttttctctatttgcatattatgtcccccatgtcatttcttagtttatttgtgctttctgctttttttttttcttgattaaccagtgtttctcccccattttgttaatttttttcagagtcaggattttcatattaattgatctatagtttttctcttctctaccttaatttctgcttttgcctttattatattcttcctttactcttttttgttgtttactttgttcttttactagcattttgaactgggaattttaatttatttccattcttctattaacaagaaataaatattggccaggcatggtggctcatgcctgtaatcccagcactttgggagtccgaggtgggtggttcatgaggtcaagagtttgagaccagcctggccaacatggtgaaaccccatctcaactgaaaataaaaaattagccaggtgtggtggcgcatgcctataatcccagctactgggaggctgaggcaggagaatcacttgaacctgagaggtggaggttgcagtgagctgagattgtgccattgcactgcagcctgggcagaaagagtgaaactatctcccccgcccccccaaaaattaagtatttaaatatatgcattttcctttgattactgcttaaagtatatccttcagctctgatatgtagtgatttaggtttttcttaatccagtttctgcgttccctttcacagagggttgtttaatatttatgttttaattttcaggcagaaatgcttaaaacattttgttatagatttcaaaatatcatgttttaaaaacatttctactttatagaatttactgatactttttttatagtatatgatcaattttataaatataccaggtgtccttgagaagatgtattctttcttaaggggtataagtttgatttatatttatcagatctactttattgattatgttattatttaggatacaggttttctatacctttactttttgtctacttttttctcggtctggttttttttgtactaagagtggtatgttaaacgtctcccccttataaatgcattttttacttttctaatatcttttgtacttttcactttataaaggtggatgctgtatttggtgcatatatacacattagtgttatatctacagtgaattgtggcatttatcattaaaagtgtcccttttatcatacttaatacattttggcttaaattatactttaatactggtmtagcaactcatggcttcttgttgtttctgattgtctgcatatctttgcctgtcccttttttaggtgaatcattttgttttaggtaagtcttttgtatacagtatagattcgggtcttgtttgtgagttgaaacccctttttttaataggtgaattaaaccatccacatttatgaatattactaagaaatttgatctcaactgtcatactgtgttatgattactgtgtgcattactattttattcttcattatgtgttttgtttgcatttttattaaacttttttggcatttaggaagttttctgtctgttctgttggttatctttgtatttatatccctttaatgctgttaatcccctgttttattcatttataatttcacttgtcatttttaatagtatttttttatttgcaacagtcaatgaacttattctacttttcctctcttctcattttttagtggctattttttactttgtcagaacatataacatttatatattattattctacacttgttcccacctttgttttgttatattaaattttcaccactggttcttttgccaaagttttcccagggatctcttaattagatgaagcttatctgctagtaggttcctcaggaatgtcttatgtgtacagtagtctctaaatttttgcattaaaattttttcctgtaatcttcatacttgaagagcagcttggctgatagaggatctctgattcacagttctttgacttttgagtctgttctctgttgaacaccttataatttagttttactttttgagaccattttgctcttttctttcatttctttcttgaactcaatcagctatttttaaattttcctttattaggggcagatttctcagttttggttttgaatttctgattcaaggtggtattttatttttccagatgtttgaggatatttaattcagtttgcattgttacgttacagttttgttttgcagttgttttcttgggagaggaatttcatcacctgagatattttgatttgcatcttttggtttctttttatggtagttttgtatctgtgtggggttctttcatctattcatatcatggatttgggtggtttataatactcctcactcaagagtaccatttttttttcttctttttttctttgatgcatggtctcactttgttgcctcggctagagttcagtggtacgatctcagctcattgcaacctccacctcccaagttcaagtgattctcatgcctcagcctccagagtagtagtagctggtattacaggcgtgtgccgccgtgcccagctaattttcgtatttttagtagagatgggatttcgccatgttgcccaggctggtctcgaaatactggcctcaagaaatctgcctgccttggctcccagaattctgagattcaggtgtgagccatcgcacctggactctctctctctcttttttttttttttttgagatggagtcttgctccattggccaggctggagtgtagtggcatgatctctgcccactgcaacctccacctcccgggttcaaatgagtctcctgcctcagcctcctgagtagctgggactacaggcatgcaccaccatacccagctaattttgttgtatttttagtagagatggagttttaccatgttggtcagggtggtctcaaactcatgacctcaaatgatccacctgcctcggcctcccaaagtgctggaattacaggcgtgagctactgcacctggcctctctctcttttttttttttctggtgagatgcagtttgtttgttttattctctttctctcctgttccttcctttcttttcttttttctttttcttttttttttttttgagacagagttttgctcttgtcatccaggctggagtgcagtggcacagtcttggctcactgcaacctctgcctcctgggctcaagcaatcctcctgcctcagcctcctgagtagtgggattacaagcgtgtgctaccacgcctggctaatttttgtttttttagtagagacagggtttcatcacattggccaagctggtctagaactcctgacctcaggtgatctgccagccttggcctcccaaagttgtgggattacaggtgtgagccactgcacctggcctcttttgttttcttttcttttttttttttttttgagataaaatctcactctgtcacctaggctggaatgcaatggcgccattatagctcactgtaacctcaaactcttgggttcaaacgatcctcgcacctcagcatcttgagtagctggaactacaggcgcttaccaccacatcttgctaattaaaaaaattttttaattgtagagattagggtctcattatatgccaaggctggcagtttctttaatagatgactttcttttggtggggggcagattgtatgcccttggatttttttttttggtctcattttgtcttgcagaaccctaaagtttcctcttttgttcctttttctttttgccacccaatctcctaaagatgcttcttcttcttcttcttctttttttttaaaccttattatctctcaaaaatgatgcctttccaagactgctccctgctccctgtagctcgtgctctggtctaccagtactctttttcagtttcttcatagttagagtttattttattttatggtggcgattgtagatccaccttagaacttcttccttcctgtgcccatatccttccttctacacacatttttcagatgcactttatcatccacaaaagcttgtgatggagtatgagagatagcttttgttgggatttggtgtttcttttattatggttaattacaaatgtgtattctctgtcttgttatcctgagggcatgggttttgtgtagtttttagttgatctttttgtcgacctttatttatgaaggatcagtggagagattcagatttaggtagctggtattattctcatccaccagttcaatgtatgtatgtatgtatgtgtgtgtgtgtgtatatatacacacacacacatatactttgtatacaaagcatatatatatactatgtatatacaaatgtgtgtatatatacacacactatatactatatatatacaaagtatatgtatatacgtatatacatatatacatttgtatatacatatgtatatatgtatatacgtatatacatatatacatttgtatatacatatgtatatatgtatatacaatgtgtgtatgtgtgtgtattttatatatatatatatatatatatatatatatatatatawgcttttttttttttttgagatagattcttgctctctcactgaggctggagtgcagtggcacaatctcagctcactataacctccacccaccaggttcaagcgattctcctgcctcagcttccgaagtagctgagactacaggcacatgccgccacacccggctaatttttgcattttcagtagagatggggtttcaccacgttggccaggctggtctcgaactcctgacctcaagtgatctgcttgtctcagcctcccaaagtgctgggactacaggcgtgagccactgtgcctggcccaatgtatatatttttatttttttaattttatttttgttttcttgagacagggtcttgctctgtcacccaggctaaagtgcagtagtgtgatcacagctcactgcagcctcgaactcctgggctcaagtgatcctcccacctccgtctcttgagtagctgggaccataggcgtgtgccaccacacctggctaattttttatttttttgtagagatggggtatcactatgttgcccaggctggtcttgaactcctgggctcaagcagccctcccacttggcctctcaaagtgctgggattacaagtgtgaggcactgcacctggccctcattatagtttagcagttgattttatttgtaaaattttagttgcatggaaaagtttatatatacctttatcataattccttgtgctatttataataattttttttctatttttaatcctatcatttcatccttatcacttctgaacaaaatgcttttggacagaattgcttatgtttcctcacatgcttagtttttagcacctgattttgaggattaaattgttttctttgcatggatatcaacagcagttgctaagtgtacctgaccggaaagatttctttatccttattctcttaaaggtctgtaacctggatacctctaccaatgaagcaatgatggctcatctgaattttggattccttgataaaatcattatcacaactatttcaattgttattctaaacaataatgactcattacctaaggagacagtaggctattccttgatgggtaattattagtgtagaccaatattaaccaaaaaaccccactatatttaaaaataattaaatgttaatctgaaaataggaattttttgtttatgtggttatttgtgcttttaaaaagtattatgacccacaaatcaccactaaagaacttacataacaaataccacctgttctcgagtaacctatggaaataaaataaataaataaattaataaaagtttaatcagaaaaagtattgctactgctgatatggtggtgtagtaaaaaaatttttaaaaaagtattgctgtttaacaactatattcacataatgaatcagaaagtggatctcagccagtgatagagaaaatttagatgagaggtgaagttttaatgattggaactaagaattttctcttactcagatcctatgtccactggtagtatatgctgttttctgctgtctttatcccaagttttctaccatgatatgctaagaagtaacttgaacatttgcgattcatttaattccctgtttcccttgcctatttgttagtagttcgaggtgcatctagacctaatttgtgctcttcctgctccctttccgattttgatttccctcgtatggcagccaggtgttcacacttggttatcggtggtgggtgtagacctgttacattgggagtagcaggtcagaggtgcaggccgagaagtgtaacttgtagtcttacactttgtgatttaaaataatcataatcattaaaggtgatttttttagtaaaatatctgtgcctactaccatccctaccccctgccccgtagtaataatgacagacaaatcacacatacacacacactgaaaaaagaacacagactgatgggaggttgagaagtggtgcacagtcgttacattctttagcaaaatgtgttctgactggtgatatcatttcttttcttttttaggaaaatcatcagcgtgttagcattttctttgactatgcaagatgtagcaagaacactgcgtggccctactttctgccaatgttgaatcgccaggatcccttcactgttcatatggtaaattttgaattgattggattctttttttaaaatttttttaaagagagagggtctcactatgttgtccaggctggtcttgaactttagggctcaagcagtccgcctgccttggcctcccaaagtgctgggattacaggtgtgagccactgcacccagctggatttttttttttttttaaatacaaagaagaaaggtttttattttaaaatttttgttttattattattttaaaattgacagatagaattgtgattacattctcattcaggtaagaaagaaacctgggccttttatgacatagtaacctgtccgttcccataggagtaactactatgacatagctttccatattggtgttcagtagagaaaggacattgggagttggaaggagatagggttgctctgatgcagttgaggttttgtagactacaaggagtgcatcaaagcctgtggagaattctcacatgtaaacagctctacagtgtttgtagtggggttaactacattttactatatagaaattaaattttactttgaagcagctactgtgtttcgtttttattttaagtagttacctgattgcttttcaatatcttaaatacactctggttttttttttgagacggggtctcactctgttgccagactgaagtgcagttgtgcgatctcggcttgctgcaacctccgcctcccgggttcaagcgattctcctgcctcagcctcctgagtagctgggattacaggcatgcgccaccacgcccatctaatttttgtatttttagtaaagacgggatttcaccatgttggccaggctggtcttgaactcctgaccttgtgatctgcctgcctcggcctcccagagtgctgggattacaggtgtgaggcactgcacccggcctacactcctgttttaaacttaggctatgtttggaagccctagtactgaagaatttttcatggaatctgaaagcagggttgagagaataaacctttgtacaaacaagacttctctatttccactggggagtgggctacgggttggggatggcaggagctgttgggggcatgtggtagctccagaggctgcttgtttcagtagatgtttttaaagttttcaaatcaagggccactggccgtgaaacatttttgaacatgtatgttatcttgctccctccctccctccttccacatgtatatgtattcatacagtatagttatatattgtattcatatagtatatttatatgttgtggacattatgaaatatctataaaaagaaattaaggaggactgatgaaataaactgtattttaaagaatacttttcaaaaagccagtaatatatttccttctttaaaattgtagaggcttgttttcttcactgtttggtttaaatgtcctcctaatggtatagcaacaaaactgacaaatatattaaacaaatatacacttaggaaatggttcattattactgtgcagccaaatccatgttaacttcttggtaatttcatttacttttggccaatctttcacattctgaggggcagactcccattggtttaaccatgtgctgataaagagcttatgctagcttatgctcttgttcctttgtcttgtgcatgcactgctgataatattttcaatccttggcctcctaacagtaatctttttaagtcagttgtctattttgtgacagtaagatgagtttaaactagataatgtatttataaattcatttagctgggcatgtgaaaacctcagcatgtcacaactcaatgagcaagtaaaggcgccccattagtccctatgttgtagaattccaaatacaccagaacacttaagtgtctgacattctgaccttggaagtgtacctgtcagactggtttgctgtattcaaatgtaagaacaaacatgagtctaccagcacaggaaattattttgaggttagctagtgtagcctttcattctctactgggatgaattattgctgaatgatttggagttttaagacagtgatttgctctcagtactgatagaatatttattaaattggtttgtgtatggagaactagtactttatattgcctatttaattttaaaaatggttagttttatagcttgaagaaaatggagaaatctttcaggagaaaggatatttgtttatgttgggagagacgactaatacctaggatgtatattatcctaagaaatggatttttaagtattaaaactcccaagtggcttggaatgagtgtgggagaggctggcagtttgttgaagagattgcttagaattctggcaagtggtttggtgacagtctgcttctaagaaagatttttgtgttctgttttttgctggtcatataatgaattccaatcttacttttgaaactcaaaataatacagggagtgtcaagaaattcctaagacccagctaatttgggttcactttgatggaaatatttaaaaatatatttttaatgtttgtttcaaaatatattttaaaaaatgaaatataaactattatttttagaggggttgagtgttaagaaattgtgtagcaaaattgttacaaatcctttttttaaggtatatgatgtgatttttagaattaatgttgcgttaaatgtatctcttatttgttttcaggcagcaagaattattgccaagttagcagcttggggaaragaactgatggaaggcagtgacttaaattactatttcaattggataaaaactcagctgagttcacaggtaaaagaaaattttttaaagtwcctttgaaaggaatataacatccgtgttcttttaagctatttatagtaaatatgttaaattacaaaaatgttttattaaaataatgccgttttgaacttgtcaagtaaaccaaactactctcagatatggtagtgtgctttgctttttctttctttgactggcttcatttcaatcctttctgtcttttctgccacttggggtttcttagtcatgcttttcaggggtcagggagtacctttcttctaggtggctgccaagatgatacaggctggagaactgaaaggacccacacagctccaaagagcacgtgcgtgtgaggcttcgataaaggaaaacaaacggtacagcaggagagagcatgcctcgggccgagagatttccaggcgcagctcccttggctgccccaggattgtgaaccaccaagatttgtgcgagaaatcttggtttttggagagctctctgaaagattcgagtgagatcttttatgcccttttggttacataaccaggctaagctgtctaaccgattacactaataaacaaactggtcctgggtgccaccaggggcatttcaaactgcaaacagcatgttctagatcattattagctaacctgcttgtccttgtctggccaagtccctcccgtgcttccagctgcctctgggtgagcctggagctacctggtccagctgcgaaaggggtgagcctggagctacctggtccagctgtgaaaggacactgtcccacacggtggctcgttctcacaatttcacagtttcagggtgggattagttaggcctaacgaacctactggtcatgttggttgcttgcaggcctttctagctctrtgtcttcgtggaggaagatagcctgcaggtgtaatgccttggaaaatgacaagttttctgttttgtcttcatgtttcctcagaacagggcaaaagataggacatgaatgatggctctgtggagtgttagtttcaggcttacagggttgaagtgtaggtatgaagaggtttggtgggattgatactcagaagaggagagaactgaaggtggacaggggaggaggattctggagatgaaaaggtagaagggaatgagattttgatgtgagggtgacctagaggaggaatgggaccaggagaaacaatattattaggttgttagattacaaatgaatgtctatttgaaattttttgaaagttgccatttagatttcaggtgactttattattttaatagattttagtttgaggcataagaaagacactgtattttgcttagatttactttttgtcttgttgcctgccttttttaggggagcctaattgccatttgtatttggatggagatattttagagtttcttgatcaaaatcttttttatgttaatagcatcaattttaactggtttggggctcggttttaaaaagcgtttttacaagagccaccattttattgagtttgtgagatatttcaaaaacaagctatttaaaacatgtaagaaacatgcttgtgaaagtgagatttaaaatttctaaatgtagcatattggttgggatcagaatgttagttaaataggatacacttctcccttttttcctgctttgaaatgatctctccctttaaataaacttcattccaggcctggtgtggtggcttatgcctgtaatcctagcactttgggaggctgaggcaggccaattacttgagcccaggagtttgagaccagcctgggcaacatagcaaaaccccgtctttacgaaaaatagaacaattagccgggcgtggtggtgcacacctgtagttccagctactcagcaggctgaggcagaaggatcacctgagcctgaggaggttgaggctgtagtgagctgtgatcgtgccactgcactccaccctgagtgacagtatgagactcttgtctcaaaaaacaaaaaaaaccccacaaaaacaaaacttcattctgggtaatgttagctttcaggtatagtggtaataaggctctgtagctgaattcataaaatgaaaattggtagggaagaatggatgccgtggcgtgctactagctttttgggcacttctaccttaaacttttcctcctaggaataacagatacattgtgcctctcaggtgactgtcacttctggaatgattgactatgcttgtaatgatgtgcaacaactgggaggaatatttctctcatcactagtggaagtaaatatttcaatgtctagaatagttttcattagaattgaactttttatagataaatgctcttcaagtattttctgcatctttttagtgcactcttttttatcacagagtgtttggctttaagttgtggactttaaattgtgcagtgcctctgctttgcgggtccttctgctgcaggggaactcttcagggtacccaggcttagcctggccttgcttcttagtctggctactgcttctgcttggctctcattgcactgtccctcttgctgtgggcaggcacttcttcatagccttctatcatgattaaaattcagactcttcgttttaaaaagtaacaattatttgtgatattacttgctactttgctcaattgtcatgcgatagtgctacatctagagtgtctcttttttctctgtcacaagtgtttttctctctcacaaaaagtaccacaatttcatgattctaatagaaataaactttcaaaagtccaagttagctgcaagtttagatgttttgttctttgaccttatagtggcctttgaagcctttttgggtagtttggagcgttgcacttgggttgtggggactcatgcctgtacttcatagatagtagttattgaatgatacaaagttaacatttcctttcagaaattcattattgcttttctcttgcactttcagcctctgactttctttaaattttctttggtcatttctatatgacatttgagattttgattgtcattataattcattagctttgctgtggataaccaagtcacatattgtaccttcctgacatcaggcacctatttttgaaagctttgctacagaatatagtgtggatagttcaatttaaggcagtcattttactggaaaaacaattcagtaagtaaatcttaagacttggaaatttgcactagctttacccatgaaatttacctggagcttagtagtcagtttattattgttccatttttagcwacttactgattaatatattatctggaagaatgtaacgatatttagaacattttatgtcatccccttgctttttatttagtaggattaggaataaaattataggggaaaaattattacatagaattaggggaaaagtttgcttagctcccttttgtaagctgatacattaggataaaatcaaaacaaaactaaataatgagttatttatttcgtaatagaaactgcgtggtagcggtgttgctgttgaaacaggaacagtctcttcaagtgatgtaagtatattccttcactggcctaaacatccccaaaataaattattttgagtcatatacacttaaaattttgaaggtgtttactagttccccaactataaatccatggtcacctccagttaggttaattgtattataaactatatataaatattgatggtctgtggagatcatcttttctgtggtagacataagacttgttctttcccgttgctcttttttccaggtgacttttgtttcagacctgagaaacaaagcaaaaatcagaattcagaagcacaactggagcaaataatcataaagttttctctttaaacttcagttatctgattaaactgtctaatatctgtctaatcaaaaggtgaacaaaagcgtcaaacatttgaaagaaattcagttacttttatttatttatttattttttgagacacagtctagctctatcccccaggctggagtgcagtggcacaatctcagctcactgcaacctctgcctcccaggttcaattaattctcctgcctcagcctcccgagtagctgggactacaagcgcccgccaccacacccagctaatttttgtatttttagtagagatgaggtttcaccaagttggccagaatggtgtcgatctcttgacctcgtgatccgcctgccttggcctcccaaagtgctgggattacaggcatgagccaccacgccaggccttctttccacatttttgtagagccaaaaggctctacataaatacataaataatctacataattaagattaattatggctccccaagttcctttcttggctaaagttacgttttccatttgggaatggctgaactttgctgtgctctaggaatagctcaggaactggaagtaagtttggacaagttaacgatgttcatgatgagagccagttgatagaaagttagggaaaacggagacagaaacagaagtgtgtctagcttcctttgttgaaagtatcactaggaaactaggaagtatctttagagggtagtttctgtaacctgcctgcaatagacccaagtgaagctctgtaggagccatttaatatccatattggttgctggtactcccataatctgaatgaatgtcacgggtatgtatgttccaagaccatagatggcagcaaaatccattttgaagctgggcttctcttggagcatgggttgaagtgtttgatgactcatatgttaggccagaaaatggctattagccttctgaagtggaatcagaacaaggtatagaactagatacgcgatcctggggccatggtgggctgaggaaatggtaggtaagaagcctcgtttctcaatcagaagcagatgtttacattgagaatctttattttgcttaaattgagagtcttcatttcatgtgtcttgaatttctaccagtttgaaaaattatttagcttattttagacttacaaacttatttaagtggttgtcaaagtattttaagttattaaagcttaaataaggaaatgcaaactctgctgacatgacatccttattttgctattttctgtgcagtgtattagaaaaacaaaattaactgaattggtggtgtgttggtctaagtgatttacctggtagattcatatacatcccaaatggaattcacatcaggagtgattgtgagttaggaaaagatggcctttggtttcctaccttcttccctttagtgactctcaaccctgaacatatttttggactcttcctgaagttcttacttttttagatggctgtctacttgaaaagcagacctccatgtgttgagagtagggtgtcagcccttcctttgattcttatatttccataggggaatcttaatatagcagctaatattcattgagcacttaactatgtgcctgacgcttactcattttacatttacatctccttgaatatttacactccctgttcaatgtaggtcatatcattagccgcattttatggatgagtagtgagaccaaacagaaaaacataccaacatgcccgaggtcacacagagactctgaagaaatggattgcttagagaattacttgtgaggcagctgagttggaattgcatctttaggcattcctcaagttgcattgcttactcagactttttaaggtatcagtatcacatctttaaatcatatcttttcagagtggagaaaagcagtttggtaaactgcattacaaattattgccacttgatgtcagtataaaacaagttttacactgcaaaatgtgaaataaacatgattcaacagtcttaccttttttaaaatggcctcagaagcatcattttaagttataagtggatcattacaaacattttgttttttttttttttgagatggagtctcactctgtcacccaggttggagtgcagtggtgcgatctcagctcactgcaacttctgcctcccaggctgaagcgatcctccagcctcagcccaaccaccaccaccaacctctgacccccatcccaccagtagctgggactacaagcacgagccaccatgccccgctaattttttttgtattttggtggagacaaggtctcgctatgttgtccaggctggtcttgaactcctgagctcaggcaatctacccgccttggccttccaaagtgttgggattataggcgtgagccactgtacccagtgaaacatttttatttaaatgacattagataagtggaatttccttaaagtgcattatttgtcttctcctaattgtgaaaatagacatcagattatatgtacttactttagactgtctgagttgtttactgattcttaaacatggattgtaagtcttttcttctgaggaaggcaggacagcgtggaagtggattgctgtgctgatgccctgatgaaagaatactgtgattcctccacaaactttggaagatttagaaagaacctggggatttgtttctttctctgttttcatttttcccctccctagcttcatttttacagtacgcataggcaagagaacgattcatgagagagcccacatgtttccgtgtcctgttctctgtgatttgtgttgcagaagcagtctggaatgagtagttgctagatgaatgctgtgtcactagtagtgacttaagttgccaggtccttcttgcttgtttcatcttgcctcttgatttagtggagcaatccatgtccagtagaaatttctgtgatggtagaaatgctcacgatagctgtactgtccattgtggcagcccctaaccatatgtggttctggagcccttggaagtgttgccggtgtgagtgaggaagtaaattttcaattttatttagttttaaaaagagccttattgaaatatatttcacatgctataaaatgcatcattttgccattcagtgatttttaataaatttacagaattgtgcaaccattaccacagtctaacttcataacatttcaacatctcagaaaaacaaacmaaccaaccctgtacacattaacagtcttccccattcctgttcttgcctccaagccctggcaaccactaacctactttctgtcttgggatttgcctcttttggacattacatataactgaaatcatacatggtcttctgtgactggcttccttcacttagcataatgttttcaagattcatccgtgttttagtgtgcagtaacagtattttagattgagaggaaaaaggacttagttttttttttttctaagtagagatgggggtttcgccatgttggccaggctggtctcgaaygcctgacctcaggtaatctgcccacctcggcctcccaaagtgctgggattacagacgtgagccaccacacttggcctaggacttagtttttttttggcttttgaccagattccttaaattgttttctctggcagttctaatattcttgttaatgagagactagtttgtttttaatttaatgctgtgctgatgtaatacttgtcaccccttcagaagaggtggaagacttctttgctttagttctttactgctttgattataagtccatcaaaagtgctgattaagtagcagaaatcagtgggccacatcagttattcacatactgcaggcctgttattaaattgtagtctgctgtagctggtgagttgtgaagtttgtggggacctggagtaactcacaggcaattacagacagtccctgccctacgatggtccaacttatgatttttcaactttacagttgtgtgaaaagcatatacatttggtagaaatagtacatgaagtatccatatgaccattatgattttcactttcagcacagtattcagtaaattacacgagctgttcaacacttgattataaaatgggctttgtattgatttttggaaggattgcctggagatatattctgaaatgcaaaagaaaattaactggtaaagtatttaaatttaagactttcttttacatgtcattttcaaagtatagcactgataacaataataagctaacctaatactatgtatttatcagttatgttctcggaagttgcatacaaagcaataatttataaagaaaatcacttttttttagttatgctgacaattttttttctgtaataaagattcccactagtcatgtaattgaattactggattaagcacattagattgaaagcagtactttgaagatttataaatttgtaaaccaatagtaaaactattttttttttggtgaaactatcttcatttagatattttatgactgttgactagaggatctcttttaatcagccaacttcaagagaattcttggggtatatatgtattttaattcctgaatattgataataatagtatattttacaattgtttagtgttttgtagaaattgatttcagtgtcatgacagtttttttttatttttcccagtggtagagatattatttttcttttcctttgctaacgagaaaacaattttcgagattaagtgatttgcccaacattatgtgacaaaacttctgattcttgttcyagtttttactctgtccttctccctctctattcctcttttactttcttttctctatttcttttttaaaattatgtcataacttacataaaggaaaatgcacagatgttaaatgttcagcgagataaatgtatacctcataattcctcctactgccttcacctcaactcgcacaaaggttatcattattatgacatctattaccatagagtagtgttgtctgatcttgaactccatttaatggaatcatacagtataaattcttatgtgtctgagctctcttgcttaatattgtgtctatgaaattcattcattgcatttagcagtaattctttttcattgcaatgtagtatttcattatatgaatattactcattctcttattgatggatatttgggttgcttctagttttttgactcttgtgaataattttgctgtgaacattcttgtacatatcttttggcagatgtatacctttatgtctgcagcacctaattttagaatagaattgctgattaatgggatgtatgtaaatttagttttagtggatcttgcctgttttttcagtttgtgtgcccttcaacaaagcatgaaaattccatttgtttcagttctttactgacacttgatattgtcctgtgttttctaagtgtctatattgaagcaaaaatcacacatacacacatatacaatcaccttttagttttaaaagaaaaagaaaagtttaatagtcatgaaacatattaattacttttagaactttgatcagcatcttttcatttcacttaaaactgctttctgggacttattttagtcaattgtatgtttgaaaagttcatctttgtggttcactgataccaatgtgctgtgcattttcaccatgaatctgtggaacagatgccttttactccaagcagacttgttttctcaagtgcggataattccagaatgtagatgaatacggtctttattctttttcacttagtttgcacttaaatcctagcattatgaagatgaatattgaaaatttgtaaacatttttataacattagttttactttgtacatacagtatcattgatgtttttatgtttcgtttattgcatacttattttgcagttcctcaattactgaatttgtaattctgtagtatatggatctctgagaccacattcaccaggaaggtgaatactgtagttgctattatctttgtgttgtgactttcactgtaatatagtaagagcttgcattttcagcaacattgaagaatttatctaaatgacattctcttaaatgtgttgagaagtgaaaatagtgtttttctctgccattgaggtttgctgtatagaaagtgcatgttgtagcaagttcttagctcagaatgcttggcacagtacaaagaatactagctcaagcatgaagagagttgacttctactgccaatctaagattaactcgctattttcttttttttgagacagggtgtcactttgttgcccaggctggagttcagtgatgccgtctctgctcactgcaacttccacctcctgggttcaagcgattttcctgcctgaccctcctgagtaactgagactacaggtgcatgccacctgcccagctattttttgtatgtttagtagagacaggactttgccatgttggccaggctggtctcaaacttctgacctcaagtgatctaccctcctcggcctccgaaagtgctggggttacaggtgtgagccactgtgcctggccaactcagtattttcatttcagcaaattatatcacctttttatgtcttggattcctcttctgaaaaaatgagtatcataataatacgctgttggtatcataaaaggggaaatttttatttcatctttaacttcaatttaagtgaaagaccaggaagtaatgcactctactttgcgtaattgaaggcaataatttaatcatttaccagtgctgtttctctctatactatgaaagtaatctctggaatggtatggctactgcctgatagtgtgcaataggagagagtatgtcagatttaggaccagcactttttatatgctcatttgtaatgggaatactgaagctataaataacaaccaagaatccatccttgtagtgtgttatgtatttcaacatagcatggtgagtagccacagaaaagaaacacttaccctgaaacaaagaatttttgtgatgagaggaaactgatggtaaatggaagagaagagggtgctctctgttgcctttttattcatttgtctagaaatcttgcttggttatctctctaagcaggaaagatgggattcctcttctttagaaaaagtttctacctgatgacttaattggaaaaaaaaatattttttcattatggaatgttgttttagaactgaaaatgcactatttatctgtctttaatttttgctaatgtttcgagttttcaggctaattatattactagatatattgtgtttttgtggaactaaattaactgctttttaggtacaacccaagatcaccttttcttgatacattagactattccaccaaatgtacttatattgttttgtttttgtattaaagtgcctggaatttctctgaagtgttaggtttttatgaacggtatttaaattggaacaaagtttagtagcatcatgtatgttaggttctgtgaatttatataacacctgtgattctttccttaagaaattctttttgaaattagcatgttcattttgaaggctgttgtctgaaatttcttttcctttctcttcttcttcttctgtttttattttttttttgagatagagtctcactctgtcacccaggctagagtgcagtggcgtgatcttggctcactgcaacctctgcctcctgggttcaagtgactcttctgcctcagcctcctgagtagctgggattgcaggtgcacgccaccacacctggctaatttttgtatttttagtagagatggagtttcgccatgttggccaggctggttttgaactcctgagctcaagtgatccacccgccttggcctcccaaagtgctgggatcacaggcgtgagccaccgcacccagcctcctttctctacttcttaaagtcttaaggcttattgtacatatttaaggaaaagcccaggtcagatgttcccactagctttggtaaaatgaaggggcttgcaactttctgggagtattactcctgtttattttaagtttcaggtttaagcacaatttctaagggacaatgttattgaactgatggttttaaaaatcatagtctttttcaagtgtttaatcagactttttatatgccatatgggtttttaaataaagtttttatttattgagttcctatgtttgtctagctgtgttgtaaaatgaattattatttatttatttatttactttttttgagacagagtctcactctgtcgtccaggctggagtgcagtggtgtgatcttggctcactgcaacctctgcctcctggattccagcaattctcatgcctcagcctcccaagtagctgggattacaggtgtgcgccaccaggcccagctaattttttgtatttttagtagatatggggtttcaccaggttgcccgggctagcctcgagctcctgagctcaggaaatccccccgcctcagcctcccaaagtggtaggattacaggcatgaaccactgtgcatagcctaaattatttttcttaaatctaacaatattcagggtgcttggcagtgtttttctcatgaggatgaagaaatttcatattgaaaaagttcaggaacttgtccacggtcatttacatataggcctatcttgaagtatttactcttctttttgttaattttattgttctttgatagttctgtaattatgtggaacagtattctctatacatagtatctttattcagggatatgtgaaacattgcaaggcagtgtgcttatttatcaaactgtatcaaatataaattattttgttcyggatttccctgtgtgttaagtagtcttgacttgtgtagatttaattcaggagacaaaatcttgttcatttctaagaggtagagattaaagcaaacatgaggattaacttttgaaaagagattagggaattttggatgctcagatggtaattccagtaggtaatcwgacttttcatttagaaatgtgtgtctgatcgcatgactttaaatgcttcccatttaaaaactcaacacttcttcttgtgcagagttcgcagtatgtgcagtgcgtggccgggtgtttgcagctgatgctccgggtcaatgagtaccgctttgcttgggtggaagcagatggggtaaattggtgagtgccctttccttttaatgtaaaataacatttacaagcatctctccttgacattttcaaagaaatatgtaatcatctaaaagaaatattytatttttttcatatctgtttaacaattgactatgctaagctttttagaagttagtaactatcaaactgagcccctttccttgcttgatctgttcttttataagaggttaaggcctcttaagaacctaatgcttaacaagacagattccaggtactcagaatataaaaaattttagaaaataattgatgatgaatgtaggcaaaaatcaacaagaaaagttcttacccaggaaagagtgaatataagcctttctttctaatgccatataatttagcccaatctttgtgggatcctaatttgcaggtatagaaactttgaggagctgcctgttcaggcttatacagacaagcacctgaaaacctccaaaacaatggaaatcttgttttaccatcagaaaatcaatttatttgttcatgagagatctaactgcttttaaaccaaatattcttttcatttagcaaggcattgtttctctgttagaaaatctacagaggagtttaggttatcaacagtaagttgcttggtgggtgaggatttaaagcaagcattggactcttaccctgtatctccagtgtaggatatacctgtgaagggacccaaatattctaggtcttttcagtcagtatttgtatgcaatttcttagaatgggttacttctgcgaatagctgttcttgtgagttgttatttgaattgtcacaactattcaatatccatcaattcagtaagttactaattatttttctattaatctataaaatttcagtccattcttgtttatttaatcctcagtttgccaggaaaaatagccatcacagtttgtcatctgggtccaacagaccctttaaaaatatatttttagtcattttgtgaaaaattgacggaactaagaataaagagagtgaaaaacaactattagaaatttcaataaaaattaaaatatagcaaacctttttgtaaaaagtacattttgatacacaaatatcataaaagattacagaaaatcatcacatgtccttgagcgaaatgatctaggttcttgctgcagaatactgtctggaagtctttcatgttcagtggctaactagttgagaatactatatttcctttttgtccttagaaatatattcctcatttatcagttcctgagtttgagtaaatgcatttatgatatagctatctagagactcacagtttaagatttcacttatttgacccatttcaccattattgttagagaatagagtgcaatctatctctttgttttcatcttctgaataatctaataattgtgaaacactttcctctgttggtcattattatgggcagaaaataaaaaattctgaattctcagctgtgttcacacttgtcaggagattcattagaaagactcacagacatagcatatagttctattcacagataagatttattacagagatacagtgaggacgcacagctgtatcataagggacaaagacacaggctgagtatggaggaatccacgtgcaggctcccttatgctctcttcctcccagaggggtcgcacagggtatcttctcccagcattgaaaatgcagcaacatttgtgtgaggtttctgtcccggaaacccatcagagactcagctctgaagattttattagaagttagttatgtagacacactgtgcctaaaacacaccaaaatttcagactcctgaaataaagtaggtgtcttaatctatttgggctgctttaacaaaatactgggtggcttataaacaatggaaacttacttctcacatttctggaggccaggaagtccaagatgaaggcactagcagatttggtgtctggtgagggcctgtttcctcattcataaatggccatcttttcactgtaaactcagatggcagaggggacaggggtctttctcaggacccttttagaagggtactaatcccattcatgagtgctctgccctcatgacctaatcacctcccaaaggccccacctcctaataccatcaccttgggtgttagtctttgaacatgtgaattttggagggacacagacatttagacaatagcagtaggaattcagcataagccacatgtttgtacaaatggtttagtttgatcaatttaggaaactttaccagccaaattcccagaagccagccaaaggccaaccttgtaagcacgtctttctgaggctagcagccttaggactttgctgttaactcttttctgcacagaaacgtaaaggtgaactacaaaaatggtgttaccagtctttttacctccataaaagataatgcagtattttgggcagtgcaataaagggtaattatttatttcactattatatcatcttcctaggtgattccatcaatctctaactttcttattattttagtctttgatttcttagtataattggttataatcaatgaataatgataaaataatatataggatgataaaacagcataagacaactaaaattcaataatatgtggtttataaaagagtccagtagaattgtttggcagaattaaaattcattttatcttacaattagggttattgtaagataaaatgaattttaattctactaaccaaaaattagatttttttctccctatggaggacctgtaagaaagaatcaaagtcatgaaatagcaatctctacaaatagttataattgcttataaaataaactcaaataccaaaatttggtccctttgaactctcatggtatactgagtacaacaaatgctgctgttctgatggctagtaccttagtattttagagaccattcagcaatgttaaccatttagcagcaaaaagatcaggataaatataatctagactatttcatgttcaaccaatatattttgatatgctaatgaccactaataagattagcagtaatcagataaacctttaggtggagaaatgggcattaataaaagtataataacttgctgaaagtatagcaatttcaaaaagtcatttaatcttttcattttttcagaaatatgtactttctactttttgagtttttgcttagcattgaatttgtgtgtgtgtgtgtgtgtgtgtgtgtgtktgtttctcacattgcaaataggaataatgtgaggagaaaaattttcaagtatagcccatttgaagagaggaagataactgaggtctttttttttcctttctgagacagagtctcacccaggctggagtgcagtggtgcaatctcagctcactgcaacctccgcctcctgggttcaaataattctgcctcagcctcctgagtagctaggattacaagtgtgcgtcactacccccagctaatttttgtatttttagtagagatggggtttcaccatgttggccaggctggtcttgaactcctgacctcgtaatccacctgcctcggcctcccaaagtgctgggattataggcatgagccacyttgcctggccgataactgaggtcttaaaaaaacccagcacattttaatctatatagtttgctgacttttttattgttgttaaaaagcctattatatacataatacaacactgtttatttgtatacctatgtaagatagaaaaatttacattatattgtgctatatattgttagcctcacaagaaagtctgaaggttaacattaacttcctaaatattggagctataagtgggcctttgctgggggtaattgcctctactgcccaaagtaatttatagatgcagtgctattcccattaaactaccattggcattcttttttattttaatataatttgatatgaagaattattaactaagtacacatttgccctttttgtatttttttgggaaattttttggtattgttatgtttttttgatagagatggggttttgccatgttgctcaggctagcctcaaattcctggctcaagagatccgcccaccctggcctcccaaaatgctaggattagcagcttgagccaccatgcccaaccactaattttgtttaaagtggaaaaaaaaaaatgactcttgagtgtcagaaaggtagtgagtgcagataccacccataaggtggggtgggtgatgtaaaataggtgggcaatggtaagagactggaatcattaaaatttgcatgcttggaggaggggctgagtacagctgaaatttagacatttgaggaggaggttttgcccagctgatattggtgtctctgaactccgaggaaaagcctcatggatttggaacccaggactctggggaggggagccagttggctagtgctgacatctttgaggaaatgtgatgaggcttgttctgctagagctggaaaaactgcaaactgaatttggctgctgctgtgggaaagaactgctgctgccgggttgaaggagtgttactggggtaatgctctcaggatcaggaagccaacaggaggaagtctgttcttccttccttgaagtcagcctctagctcctgttcttggcatagcctaacatggagccaactggtagaacagaaatgtggttttcagggtctcagccacagcatcacaaagccaagtgcagaaggcttggcttaataactggaacagacagcaaaggaaaccagggactagggtgtttacagtataaagtgacatgattttatagcagtttatgtactgatatcaatattaattaaaaagcaagttttacataacatccaaaaatagagaagacaaggcaaaagccatgcatgagaacattaaaaacaattagtgaactgaactatatacaaatcatacaaatgaagaaatgacacagataaaagcctttcagtaagttacagtaagtttagattgtaaaatcaggcttagcattttaaacatttatattattagagcagctttagttttacagaaaaaccaaaagtgcagagagtttccattacatcctctcctctcccgcctcaaatttccattatcattaacatcttgcattagtatggtatatttgttccaaatgatgatccaatgttaatagatttttattagtaagtttccatagcttatattagggctcactctttgtgttgtacattctatggtcttcgagctcttaacccctttggtctttttttctttttaaatggtaggctctgctccaatatgaaggtcacttttaatggtcttatttgatgatttctgtttttttttttatttgatgatttctgaactctattctttgaatgtaggtattccccagggcaatttccttagcttttcttctattgtatatattctgtctcttggtgtaacctccttcatgtccatgtcattttcctagtttccttatcagtaaagtaagagatcaaactagaaatttgatcaaactgaggtttttgatctcttgatcaaactgaggtttttcctgacccccgaattcagtaattggctatgtcaaatttgaacccatcacaggttttcaccaagcgcttcccttcttttctctgtttcctttattttaaagctatcggtggtcttactggttgcccagactcaaaatctccatgtaacatttggctctattgtctgtccgattgctctttccattcccgttgccatattacaagtctttgttccctttcttcttgccgcacagcaggagctcctgcttcctgagatcctgtgacttttggagagagggttaagtggagctgtactggaaatggttctctgtgagtagcaatctagctgcttgttattgctggcagaaaagaaacaggacataattcagagagacctgttccattagtgcaaaaagagaataattgcttatttcttctttctaaatgttttgtaaatgtgttttttttgtttgtttgtttttcagcataatgggagtgttgagtaacaagtgtggctttcagctccagtatcaaatgattttttcaatatggctcctggcattcagtcctcaaatgtgtgaacacctgcggcgctataatatcattccagttctgtctgatatccttcaggagtctgtcaaagagaaagtaacaagaatcattcttgcagcatttcgtgtaagtgttttatgttggtttgtgtgtatgtgaggcatttttcactgtgcagtatatttgagtttttagcaggcgggaaaaaattacttgttcttcttgtggttatgaaaccatagagtcttggtgaatatagagtaaaatatcactaatttgtatttatggtgtgggcagtgggataggtgagaggaaactatctatgaatgaaatctgtgagttacagtatgcttgtagggaaatgcaattggattatgttcagatggaggaagtccttttctgttgcagtgtattccaagagactgtttttgaaggagtttctctcttatggagcatgtatgttagtatggagttgtgtttcaggttctggatctactgactggagtacatttttgaggcaactataaagatctatcattatttaaacagtaaagttatcctattaggatattagatttgtcagttacctaagtcatcttcctcctttgaacagatgaggaagttgaggacaagagaaagcctagctagaatcgaaatcctaggttgccaggtggttttaatacttcacgttgctaattggctaccgagagccagtgtatttgctgtgccaattgtctactgataattttgttggtcactttagatgggcttctatgggatggcttggttgaagtaatctctctaagaatgctattcaaggttagtaatagtggacatgtcccatatagtgcctaccctctgctatacattgttctaagatttttctgtttaattcatttaatgctcaccagagctctataacatgttattgttgttactgttagtatataggtatctttgctatacgttgggaatactgaggcgtagaggtcacattgctgataggtagcagacatgcaaatccagaatgttggctgtagaatctgtgcttttaaccatttttgttcttatactttctttaaaaaacaagtaaaaaataaaaagtggggctgggtgtggtggttcacacctgtaatcccagcactttgggaggccgaggtgggcggatcacctgaggtcaggagatcgagaccatcctggccaacacagtgaaaccccgtccctactaaaaacacaaaaattagctgggcgtggtgtcatgtgcctgtaatcccagctgctcaggaggctgagacaggagaatcgcttgaaccagggagtcggaggttgcagtgagccgagatcgcgccactgcactccagcctgggcgacagagtgagactccatatcaaaaaaaataaagtaaaatgaaaataaaaagtggtacagatgtattgcaaaatttaatgtagataacacatttgccaaatatagttactagcatctttcagatgtttgcaagcacagagataaataaatagatgtataattttgttttgtatttaaaaataaaaatgacatattatactggtctataactttattcttaatatatagtgaatatgttttcatttctgtatatgtggatattcagtattttttttaatggctattttccgctgtgttggtgtagagctatttatttaaccagtgctctattgatggccatgtggtggtgtttctagtttcttttacatatgtttgcccactttgatgaatatttcttttggatttagttctggagatggaactgccgagtcaaatgaatgtgtttgtacacttttttttgtttttttaaagacagtctcactgtgttgcccaagctggagtgcagtggtgcaatctcagctcactgtaacctccacctcctggattcaagcgtttctcgtgcctcagccacctgagtagctgggatcacaggcatgcaccaccacattcaactaatttttgtgtttttagtagagatggggttttaccatgtttcccaggctggtctcgaactcctgacctcaagtgatccacctgcctcggcctcccaaagtgctgagattacaggcatgagccactgtaccccaccattttttttttgagacagggtttttactctgtcatccaggctggagtggagtggcgtgatcatagcttactgcaacctcggactcctcagcttgagggatactcctgcctcagcctcccaagtagctgggactataggtgcatgccaccgagcctggctaatttaaaaaataaaatcttttgtagagacaggatcttgttttgttgcccaagatgatgttgaactcctgggctcaagcagtcctcctccctcagcctcccaaaaattgtgggattacaggtgttagccacagcagctggcctgcacttttggtagataatgtcatgcagttttcaaaaatgtgcagatttacatttccatcacctatatattgggagtgcatatttttctgctcactataatattacccttcttttaatttttacaaaatcttggtttaaaaactaaatcattgttttaaatttgcattccgttaataatgaatgaggctgagcatcttttaatattattggctatttatattctttctataaattgcttattcatagcakttgtcaccttccaaattttaaaatttgatgtgtaggaactcttttctaggtgtcggtagttaataacagctaatgtctattgagagcttattctgtgtcaggcactgtcctaattactttaaatgtattccacatataattgtcccagraactccatttagtggtcactaggacacgagaggttaagtaatttgccaaaatagctaggaagtggcagaccagggatttaaactcaggcaatatgatgcgtgcttttaaccatcatgctaatctgtctttgatgctgagaataataattgttaaaatttattaagtaatttttatgcattgccttatttaagcttcatgattacccagtaagttctattactatttttattgataaggaaaccaagactcggagataattccccagtaagtgaaaagattggaatttcactgagatctgccagctccaaagctgtcctcttaaccaccctgctatctcctttttttcttgtctcgatgcattttctcaggaaccttaagactggcattaaaaagggggaaacgtgaaaaggaaaaccaaagctaatatcaggggaagatttctttgcttaaaataccagctggatgtgttaagccctgtgtatttcctggctgcctggcaagggctgagtgagtgagggacggcatggaggagtggtgttcagtgtggattctgggagagtgtacagtgagatccaggtgtggcctgctgggtgtgataaacaccgacyagctattgaccaggtgttgggctgggcattagattttctttcgattatgtttatttatgaaagtaacagtctttttcatgtaaaaatcattctgtggtccttgaagttcactcttgagaaacaggcaaatgcggagcctccttacttctctccctcaccatggtggctctgctcttcatgtttcctgcacactctgtccacatgagttgtcacagtaaatttcagtccagctaaaataataatcagttcttaagtcaaagtaggttgtattaatgaggctttactttggagtattttagtaggtaaactgaatgtatttttttcttctacttaagtgcttcattatccatattcgtatttatttagtaaaagcaaaaattttcagaaatggagtcttttgccaatctctcctaartcacaaaacagttgtgggttccatgtatgtgccaggggctgtgctaattattcggggacacagatgaccaacatagagctggacatcgaaggtcttatggtttggtgaagacagtcgacgtgaataagcaatgccagtgcaatgcagtgatgagtgacgaagggaggaaaggcagtagaagagaggcggacagccagaggaggsrtgtgaggaggagacagggccygaggggccttttgaacggggatgtgaggagaagagagggctcaaggggccttttgaaccaggaatagttatcttggaagtgcaacggtggggagaggttgaatgttaacaagtgaagaaagaatcttctggaatcatcagtagtttgtgcttgtaggacttgttattcctttccctgacccaggtgacttctgagagagtaaatggagcacataaatctggctcttgaagatgcaatcctgggatttgtggctgtttactttctgaaggcacagacttgttctgtgaatggatcttttgcccctaccactctgggcatagaactagtggggccaacatgaatatttcagtcatcctggttatcacctgacactaacttgtgctcacactcttgggcatcactcactgaagcatggcaccttctaataagaccctttgtcagatctagttttagcactttattctgtgctctcctgctctgagggaacatggaataagarctgattcttcttttaaatttgttcactgtggcaaaatagatattgcatcttttcaactcaataaatttattctctgagggcttaatgctccttctgttccatttgtcttagttttgagtttctcccttgtctttccttttttttaattctaccattgtcacaggagcctttattttgccaaaatcttttagtgtaaattaagcatctaccatttgcaaaaatagagctagtttgatcttttactgttataaaaataatgtggttttatggttaaaaagatacaatagaaaaatattaagtaaaattgtaaattacccacaatatcactcccacatacggagcccccttgacgttttaaaacctgcagtttataatctctgttcctttactacaactaggcttcaactctggatgaattacgataggcactaaatagctgaaggagtctttgaaatctcatctcttcatgatttgggtggatcatgcttggccctcctcactacaaagtctgtatgcactcaggcctgtagtgagtgtgctggcatgtgcagtggcagtcaggttcgctgggctcttgggctggcctccaggctttggccaagttgcttagcctctccgtgctttagtttttttcgtgtgtcctgtgagagtaatatcatctctcctacatctattactttgttgatactcacatgataatacccttcgaaaaatatgtgctaaatgaacctttggtgcctaatggaccctcagtaaatatttgtgactgtataaagggctggtcgtggggtggttgttggcaccagggctacagcagtcatggtaaacttacttcaggttatgtgaacactgggttcatatagttgtctctgtggggtttgtctttggatgttacctagacagaaagaatagtgaaaagtcttttggaacgcaagtgtgttatttacaagggaattgccatccaatgaaaaagttaacctggaggtaaagactggcccagttactgaatgttcacattttaaaaattaagagagaagtaaaaacatgtttacttaattagatgaacatataacagaaagcaagactagagagagagggtccctgttttctgttagcacatggacttttgtctaaattggaagttgttaataaacttggtactgaaagcttttttcagaaaaggagatatattttgtaactgctaaactgttaggaaagatggttacatttgactcaatgtctttgctattagattatcctagaaagatgaattattattgtttttattatcttttgtgtgactttcccttaggggcaatagaaaggtcagcagtttcctaattagttaatgtggaagtgaatagtactatttttccatttacctctacctgttcttttctgtatgttatatattttttgaaatgaaaatatctatttttcaaattgtaaaagattgtaaaaatttataattatttcttgttataggcttttaataatttgttaataacttgtctatttaaggtgaaatagacgtatgggaaagagctgtaatagaagtcagggtcttattttagctgtcctgttgtttcaaagaatgtatctttcccttatatcttttcctctcagtttcaagagactacatggcttttaaaggtattatttagaatattttaagtgctgcaagtttctatgaaaaaccaggtattaataattttttttctttttgagacagagtcttgctctattgcccaggctagagtgcctgcttcggcctcccaaagtgctgggattacaggtgtgagccaccgtgcctggcccaggtactaatttttaataatgggctgagatttaatctaaagcccagcaaaagctgctttaatcattatatgatattctatccaagcttcccacataccctacttttttgtccccacttagttcctcctctcttcctttrtttttcactgaatcattaggtaaaataaaaaggttattggaagcatgtatctaatactgtaatatcacagaagagagatattagttgatattaattgaatcctgcctttaagttcttccttctccttttctctcccattcttcctcttgtatttattcatctatcagtgcatcagatgtttattgaagaccaaatatatgtaaggcaatttgttggttactgagtatatggaaagatgcataagatagaataccttttctcagaacctttgcattttgtttaaacctttgttttgatagcgtaacttgatgaagtcactgtgtttacggtatacaaagctcaaaaagtcaccataagtgtagagccagactgagattcctaagttttttcttttgacctcatttgggagctttctgaattaattatgtacctttatggaaatctgagaaatagagtagtgtaactgtttcataatggcgcagtagaaggatagacaagagtctctctggagtggatagacctaggtgtgaattccagcacttgattgtttagtgttgggagagtggcttgaactcccagagctagtttctttatggtgaaaggtggtagatggtacttaactcatttaaacattaggtaaggaatccatgaaataacagttaaagtgtctgcaatagtaaatatacagtatgtatttatttccctgcccttttctccataaaatcatggaataataacagttttcctctttatctctgtaagttggattcttgctaagttaatattaagcccaggtaaagatctagtgctgttttgtttgatttaaaagagacagcatgaatatgttactaatatttagcaagatttaaaaatctcatttaaactatatttataatttcaaatttttacttataatgcatagaatttaataatttatgggcttctattgtctaattttgggtttcagaatatttaaaatagacccagtccaatggcagaaatattagttttttttagattctcatatgctaaatttggggtaatgcacttattatgtgaatatgctgagagcagaaagaagaacatctttagacatccacaattttgatatgtacagtggaactaaaattgagccattgataaagacatagtaaagccatttgatttataccatcaaactgattttaacaatgatgatttttaaagtaattttcaaattcctgtaacctttaaaaaagattttactgatgaggttatttgaagatagtatagacacatcctaaaactcagggaaattttttttttgtgggaggctttagaaaacttgctgagctactgtgagctgaacaaatctagcagctgctaatgattgttattatttttccatttggctggatgaattttatttttgaaaatgtcaatctcacttattcatagtgcatgctgtactccaggtctctgcatatattactgctgttggttaaactgatttgtcaatctttaggtcctaaaataaattaggatgttttggggctgtgactgataaagacattgaagatcatctttgttgcctagagttttacatctgtttgttgtgcatttgatttctcttctgggctctgcttagtcaaaagcctacattatatgtcagataaagtgaattgtatttttacagtgatatacttttcatcagaaagccttaagaattacagccaaattgagttgttcttttcattagatagattaatcatgatgtttaattcacatctacacatgtatactcactagacataaacatgcacacgcatgtacatgcatttttccatgcaggcagttcatactcataaccctttcaaagaggctagctctagtctgtgtgtgtggggctgttctgaccactgctatggcatggaaatattgccatgaagaaattttattctggagtctatcccttatcccctgtttcaggaattctgcctcaacgtctttgcctaacttctatcttgcttagtagatactaggtttggatgaggtctggtaagactgagactttttaaattttggggtgagtcctttaatacagcatttttaaaagtgtggtccacattatcagtgcagtgcagtgaactgtttgttagtaacctgcaatggataagtacagaaagtgaaagtcagcatttagaaacttgtaggaatttgacagaataatgatttattgaattttataatatgaaaattgaacttgtattttacatgtcttgaaattcattcttactgtgtttcataaaagtatttgctcatgactgattgaaaatcaaaaaacaagcaaaactggtcttcaccaccgatggttttcgaaacactgctttcacatatattttacaaggccagcagttcagttttgctgacagaaagatctgaattgtcacctgattccaccttgttcttagaaatgtcaacatccctctgcaccattaatttgccaaaggcaaaaatgatgtttatactggatttgtcacttttgcttttgttgaggtgaagataccatctacttttagagaaggaataacatatttcagggagtggagccaagatggctcaatagtaacagctccagtctacagctcccattgtgagtgacacagaagacgggtgatttctgcatttccaactgaggtaccaggttcatctcactggggagtgccagacagtgtgtgcagcgcacagtgcgtgagccaaagcagggtgaggcatcgcctcacccgggaactgcaaggggtcagggaattccctttcctagtcaaagaaaggggtgacagacggcacctggaaaattgggtcactcccaccctaatactgcgcttttccaacaggcttaacaaatggcacaccaggagattatatcccgcaactggctcggaggatcctgtgcccacggaggctcgatcattgctagcacagcagtctgagatcaaactgcaaggcggcagcgaggctgggggaggggtgcccgccattgccgaggcttgagtaggtaaacgaagcggcctggaagcttgaactgggtggagcccaccacagctcaaggaggcctgcctgcctctgtaggctccacctctgggggcatggcacagacaaacaaaaggcagcagtaacctctgcagacttaaatgtccctgtctgacagctttgaagagagtagtggttctcccagcacgcagcttgagatctgagaatgggcagactacctcctcaagtgggtccctgacccccgagtagcctaactgggaggcatcccgcagtaagggtggactgacacctcacacagccgggtactcctctgagacaaaacttccagaggaacgatcaagcagcagcatttgtggttcacgaatatccgctgttctgcagccaccgctgctgatacccaggcaaacagggtcaggagtggacctccagcgaactccaacagacctgcagccaagggtcatgagtgttagaaggaaaactaacaaacagaaaggacatccactccaaaaacccatctgtatgtcaccatcatcaaagaccaaaggtggataaaaccacaaagatggggaaaaaacagagcagaaaaaccagaaactctaaaactcagagcacctctcctcctccaaaggaacgcagctcctcaccagcaacggaacaaagctggatggagaattactttgacgagttgagagaagaaggcttcagaagatcgaactactccgagctaaaggaggaagttcaaaccaatggtaaagaagttaaaaaccttgaaaaaaaattagacgaatggctaactagaataaccaatgcagagaagtccttaaaggacctgatggagctgaaaaccacggcacgagaactatgtgatgaatgcacaagcctcagtagtcaatgtgatcaactggaagaaagggtatcagcgatggaagatgaaatgaatgaaatgaagtgataagagaagtttagagaaaaaagagtgaaaagaaatgaacaaagcctccaagaaatatgggactatgtgaaaagaccaaatctacgtctgattggtgtacctgaaagtgacggggagaatggaaccaagttggaaaacactctgcaggatattatccaggagaacttccccaatctagcaaggcaggccaacattcaaattcaggaaatacagagaacgccacaaggatactcctcgagaagagcaactccaagacacataattgtcagattcaccaaagttgaaatgaaggaaaaaatgttaagggcagccagagagaaaggtcgggttacccacaaagggaagcccatcagactaacagtggatctctcggcagaaactctacaagcaagaagagagtgggggccaatattcaacattcttaaagaaaggaattttcaacccagaatttcatatccagccaaactaagcttcataagcgaaggagaaataaaatcatttacagacaagcaaatgctgagagattttgtcactaccaggcctgccctacaagagctcctgaaggaagcactaaacatggaaaggaacaaccggtaccagccactgcaaaaacatgccaaattgtaaagaccatcactgctaggaagaaactgcatcaactaacgagcagaataaccagctaacatcataatgacaggatcaaattcacacataacaatattaaccttcaatgtaaatgggctaaatgctccaattaaaagacacagactggcaaattggataaagagtcaagacccatcagtgtgctgtattcaggaaacccatctcacgtgcagagacacacataggctcaaaataaagggatggaggaagatctaccaagccaatggaaaacaaaaaaaggcaggggttgcaatcctagtctctgataaaacagactttaaaccaacaaagatcaaaagagacaaggccattacataatggtaaagggacgaattcaacaagaagagctaactatcctaaatatatatgcacccaatacaggagcatccagattcataaagcaagtccttagtgacctacaaagagacttagactcccacacaataataatgggagactttaacaccccactgtcaacattagacagatctactagacagaaagttaacaaggatatccaggaattgaactcagctctgcaccaagtggacctaatagacatctacagaactctgtaccccaaatcaacggaatatactttcttttcagcaccacaccacacctattccaaaattgaccacatagttggaagtaaaacaccccttagcaaatgtaagagaacagaaattataacaaactgtttctcagaccacagtgcaatcaaactagaactcaggattaagaaactcactcagaaccgctcaactacatggaaactgaacaacctgctcctgaatgactactggggacataacaaaatgaaggcagaaataaagatgttctttgaaaccaatgagaacaaagacacaacataccagaatctctgggacacattcaaagcagtgtgtagagggaaatttatagcactaaatgcccacaagagaaagcaggaaagatctaaaattgacaccctaacaacacaattaaaagaactagagaagcaagagcaaacacgttgaaaagctagcagaaggcaagaaataactaagatcagagcagaactgaaggagatagagacacaaaaagcccttcaaaaaatcaatgaatccaggagctggctttttgaaaagatcaacaaattgatagagcactagcaagactaataaagaagaaaagagagaagaatcaaatagacacaataaaaaatgataaaggtgatatcaccaccgaccccacagaaatacaaactaccatcagagaatactataaacacctctatgcaaataaactagaaaatctagaagaaatggttaaattcctagacacatacaccctcccaagactaaaccaggaagaagttgaatctctgaatagaccaataacaggctctgaaattgaggcaataattaatagcttaccaaccaaaaaaagtccaggaccagatggattcacagccgaattctaccagaggtacaaggaggagctggtaccattccttctgaaactattccaatcaatagaaaaagagggaatcctccctaactcattttatgaggccagcatcatcctgataccaaagcctggcagagacacaacaaaaaaagagaattttagactaatatccttgatgaacattgatgcaaaaatcctcaataaaatactggcaaaccgaatccagcagcacatcaaaaagcttatccaccatgatcaagtgggcttcatccctgggatgcaaggctggttcaacatacgaaaatcaataaacgtaatctagcatataaacagaaccaaagacaaaaaccacatgattatctcaatagatgcagaaaaggcctttgacaaaattcaacaacccttcatgctaaaaactctcaataaattaggtattgatgggacgtatctcaaaatactaagagctatctatgagaaacccacagccaatatcatactgaatgggcaaaaactggaagcattccctttgaaaactggcacaagacagggatgccctctctcaccactcctattcaacatagtgttggaagttatggccagggcaatcaggcaggagaaggaaataaagggcattcaattaggaaaagaggaagtcaaattgtccctgtttgcagatgacatgattgtatatctagaaaaccccattgtctcagcccaaaatctccttaagctgataagcaacttcagcaaagtctcaggatacaaaatcaatgtgcaaaaatcacaagcattcctatacaccagtaacagacaaacagagagccaaatcatgagtgaactcccattcacaattgcttcaaagagaataaaatacctaggaatctaacttacaagggatgtgaaggacctcttcaaggagaactacaaaccactgctcagtgaaataaaagaggatacaaacaaatggaagaacattccatgctcatgggtaggaagaatcaatatcgtgaaaatggccatactgcccaaggtaatttatagattcagtgccatccccatcaagctaccaatgactttcttcagagaattggaaaaaactactttaacgttcatatggaaccaaaaaagatcctgcattgccaagttaatcctaagccaaaagaacaaagctggaggcatcatgctacctgacttcaaactatactacaaggctatagtaaccaaaacagcatggtactggtaccaaaacagagatataaaccaatggaacagaacagagccctcagaaataatgccacacatctacaactatctgatctttgacaaacctgacaaaaacaagcaatggggaaaggattccctatttaataaatggtgctgggaaaactggctagccatatgtagaaagctgaaactggatcccttccttacaccttatacaaaaattaattcaagatggattaaagacttaaatgttagacctaaaaccataaaaaccctagaagaaaacctaggcaataccattcaggacataggcatgggcaaggacttcatgtctaaaacaccaaaagcaatggcaacaaaagacaaaattgacaaatggtgtctaattaaactaaagaacttctgcacagcaaaagaaaccaccaccagagtgaacaggcaacccacagaatgggagaacatttttgcaacctactcatctgacaaaggctaatatccagaatctacaatgaactcaaacaaatttgcaagaaaaaaacaaacaaccccatcaaaaagtgggcaaaggatatgaacagacacttctgaaaagaagacatttatgcagccataaaacacatgaaaaaatgctcatcatcactggccatcagagaaatgcaaatcaaaaccacagtgagataccatctcacaccagttagaatggcgattattaaaaagtcaggaaacaacaggtgctggagaggatgtggagaaataggaacacttttacactgttggtgggactgtaaactagttcaaccattgtggaagtcagtgtggcgattcctgagggatctagaactagaaataccatttgacccagccatcccattactgggtatatacccaaaggattataaatcatgctgctataaagacacatgcacacgtatgtttattgcagctctattcacaatagcaaagacttggaaccaacccagatgtccaacaatgatagactggattaagaaaatgtggcacatatacaccatggaatactctgcagccataaaaaatgatgagttcatgtcctttgtagggacatggatgaagctggaaaccatcattctcagcaaactatcacaaggacaaaataccaaacactgcatattctcactcataggtgggaattgaacaatgagaacacatggacacaggaaggggaacatcacacaccgggggctgttgtggagtgggggatgggggagggataccattaggagatatacctaatgctaaatgactagttaatgggtgcagcacaccaacatggcacatggctacatatgtaacacacctgcacgttgtgcacatgtaccctaaaacttaaagtgtaataataataaaattaaaaaaaagaaaaaaaaatataacatatttcaaaaaatgtgttgctgccacattaagtagattatttctggcagattcagtttcttaactactttttataacccattcattccttcttttcattttttatagcaagatgacacaatgaaatgagaacatgtatttaaagaagaatagagaaggcttaatgattgatttgacaaagttgacgaaaaagggaaaatcaaaaatgactaatctttgaaatgccattatcttggacaatttagagggaagttggttttagaagaataccatagggttgttctacattagttattgaatgtgttgaagttatagttgaagccattagttatgataatgtcttttttttttttttttttgagatggagtctcaccctgtcaccgaggctggaatgcagtggcatgatctcggctcgctgcaacctctacctcctgtgttcaagtgattctcctgcctcagccttctgagtagctgtgattacaggcatgcagcaccacgcctggctaatttttgtatttttagtacaggtggggtttcactgtgttggccaggctggtctagaacccctgccttcaggtgatccgcctgccttggcctcccaaagtgctggaattataggtgtgagccatcaagtccagccgacaatatcttaaagatggagtttaattctctggtcaacaaatacatgtaatgaaattaacaaaaccatataaacaaaagagctttgatatgtttctaaagttagaggagaggataggtaataggaaaagtaactgggaaagaccatcgaaagtttagtagagaaataagtgaaatctcacaaaaggaaaggaagaggggaagagttttataagtaagaggttaacagatttacacctcccctctcagaaaataatttgtttagaaagaaataacaggtgttctgaaacagaatagtttgtagaagtagttatacaaggaactgggggttaagagaagaattataaataatctgtgatatctagtatgtcctatttactaggatctcacactttagtaaaggagacaagcatgtaataatattagtgtcatatatcatgatttcttctttgactatggattacataggagtgcattgttaaatttccaaatagaaattagaaagttactggtctttttaagcttaattccattacggttaagaacatattctgtaagatttcaatcctttgaaatttgggactcattttatggcttgtcttatagtctgtcatagtggatgtaccaagtgcacttaaaagaatgcatattttgccagtggagttgtgttctgtgtcatttaggtcagggtggttgacagtgttatttagatcttctatgtactgatttttttgtttagtggttctatcaattgctgagagagctgttaaaatctctagctattattgtggatttgtctatttcttcctgcagttttgtcaatttttgcttcatgaattttgaagctctgtaattaaaacacaatgaatgctacattttcctgatgaactggactttgtatcattgtgaaatatccttctttatcactggtaatgctctttgtttactttatttgaagttaatatcactccagcattcttacgcttatggttgcatgctatatctttttccttcttagtttcaacttacctgtgtcatatttagtttgtctcttttaggcaacacatccttgggtcttaaacttttatctattcaaataatttctgcctcttaactggagtatctagttcactggcatttacaataactattgatatgattggatttaggcctaccattttactctttgttttctgtttgcttatctgttttttgttcttctatcttccatttttgctttctcttgggttaagtgcatcctttaaaaaatttcattttacttaacataatgacctccagttctgtccatgttgctgcagatgacaggatttcattcttttctatggctgaatagtcttcggttgtcagaggctgagaagggtaccagggtaggaggggatgaagtgagattggttaatgggtacaaaaatacagttatatagaagaaataagacctaatgttgtacaattcagtaggttgatagtaaacagtaatctactgtatatttcagaatagctagaagataataattcaaatgttcccaacataaagaaaagataaatgtttaaagtggtgggcatcccaattaccttgatttgataattatagattatatatgattgtatcaaaatgtcacatgtactccccaaataggtccatctgttatatattaataaatttttaaaaactatcataacatttctttggggtctttaactatttgtttttgcactattttatttcttagaggtgattttggagtcacaatacacatcctttctattgtactaccttatgtaaaatgtaagcacttgtagtcttttatgctacagttgtcatgttactgtatttacatgttataagccctacaatacagggttttgtgctttaagcagtctcatgtatattatggaagtaaagagggaaaaacagtgttttatatttatccaggtatatattaatatgatatctacagttcttttttcttttctggacactcagctttccacttgtggtatcactttcctttagctgcagaattttctttagcccagggatcagcaaactttggaagcctatgggccaaatgtggtccacctgtttttaatcaataaagctttattggaacactgctttgctcatttgtttatgktttttaatgactgcttttgcaccgtagtagtagaattgtgcagttgtgacagagactgcaaagcctaaaatatttactcttcgcccttttacagaaaatgttagccaatccctgctttcggatatcttccagtgtatgtctgctggtgactgattatctcaggttattataaaaaatgattttagtttacctttattctggaaggatatttttgctggatatagttctgttttttttttctttcggtactttcaagatatcgttccacttctgacctctctcctttatttttctctctctttttttaatgctctctctcagcaaaatcatctccatcgtttctgatgagaagtcagctttcctttgtatttttgttcccctgtatataatgtgttatctttttctggttgctttgaaaattttactatatttggttttctgaagattgactttgatgtgtctggatttagttttatttgtatctacatttcctagtatttactgaagttacagatttgtagagttgcatcttttgctaaagatggaaaattttggccattatattttcaggtatacatttgcacctttttacttatccttgccttctggcattctaattccacttatgttagaccttttgatattgcactgcaagtcactgagcctttgttcactttgtttgtgggagggaagaaacagtatttttttgtatctgtctctgaaattgaataatttctgttgctctgtcttcatgttcactgactcctttgtcatctccagtccacttttgagctcatttgtaaattttaaaatttcaaatgatctgtgtttttatttctaggatttccatttgggaatttagtttctgtgtctccactgaactttctttttttgcttttttattggtaccgtttttttctttggtcatagtcgtaatgtttactttaaatctttttctgcaaactccaacatctaattcatctcagggttggtatttcttgactgacttttctcttgagtgttggtcacattttcctgtttcttcataggcttattaatttgggagtgtattctgaatgttgtaaatgatacatcctagaactggcttctgttatgtttctccataggacattgaggttgtttagcaggcagttaacttggctgggctccagctccaagctctctcttcctgtggggagaagcagcttaaatcttttttcagttcttttagatgtagctgggctgctgggagtctgtccttgtgagaggtgacagcgtgctggcagtcctcacagccctcgcttgctttcagcgcctcctctgcctgggctcctactttggcggcacttgaggagcccttcagcccaccgctgcactgtgggagcccctttctcggctggccaaggccagagcccactccctcagcttgcagggaggtgtggagggagaggcacgagcgggaactagggctgcgtgcggcgcttgcgggccagctggagttctgggtgggcgtgggcttggcgggccccaaactcggagcagccggccggccctgctggccctgggcaatgacggacttagcacccgggccagctgctgcggaggctgtactgggtcccccaccggtgccagcccaccggcgctgcgctcgatttcttgccgggccttagctgccttcccgcggggcaggcctcgggactgcagcctgccatgcctgagccttccccgcctccgtgggttcctgtgcagcctgagcctccctgatgagcaccgccccctgctccacggcgcccagtcccatcgaccgcccaagggctgaggagtgcgagcgcatggcgcaggactggcaggcagctccacctgcagccccagtgcgggacccactgggtgaagccagctgggctcctgagtctggtggggacgtggagagtctttatgtctagcttagggattgtaaacacaccaatcagcaccctgtgtctagctcaaggtttgtgagtgcaccaatcgacactctgtatctagctgctctggtggggccttggagaacatttatgtctagctcaaggtttgtaaacacaccaatcagcaccctgtgtctagctcaaggtttgtgagtgcaccaatcgacactctgtatctagctgctctggtggggccttggagaacctgtgtgtccaaactctgtatctaactaatctgatggggacgtggagaacctttgtatgtagctcagggattgtaaaccaccaatcagcgccctgtcaaaacaggccactcggctctaccaatcagcaggatgtgggtggggccagataagagaataaaagcaggctgcccgagccagcattggcaacccgctccggtccccttccacactgtgggagctgtgttctttcgctctttgcaataaatcttgctactgctcactctttgggtccacactggttttatgagctgtaataccgtggaggtctgcagcttcactcctgagccagcgagaccatgaacctaccgggaggaacgaacaactccacatgcgccgccttaagagccgtaacactcaccgcgaaggtctgcagcttcactcctgagctagcgagaccatgaacccaccagaaggaagaaactccgaacacatctgaacatcagagggaacaaactccggacacgccgccttcaagaactgtaacaccgcgagggtccgcggcttcattcttgaagtcagtgagaccaagaacccaccaattgcggacacacttgcgttgcataggtcattggtcagctagagatttgggcagagttcatatgcagaatttgggtcttctttatgtttctctctgatttctcctctcactttctagccgctgtagtcactctgaattgtcctctgtctccttaggtcattgaggctgtggtttccggctgagttttacctgaatttttctgagtggggcgtatcttcaggaggagagccatatgtaaaagtagaaatttttctagtgccattccttttttttttcatatctagactccattctagtttctgctaccttttgttcgttcaggtaatcttttatatttcatccagattttatagttggtttctgtggaagggttgatctgatagaagccactttatcattcctggaagtggagtctctggaatatattttaaaattgaaccagtaaatatacactttgttcacaatgttttacatgaaaggataaaatagtaacatgatagaaattcagaagtaacctgatgaaaatatcacagaatcgtagttttgtttttctgacttaagataacagttcaaactgaactgtcctctctctctgaaatgaatactttctactttaagtagatggaagctttgctaactttaatagtctcgaagtttaccagggtcactttggttcttatgttttagttttgtgtgtttgtctgtgaattataaactcagaattctataggcaacaaaaatattctttaaactttttgtcagcttgacaatgctatgcctttgcatgggcttggtgttcactggacatcttgtgtctgaaaatttctctgagattgaatttgggaaacttgcagccattatttcttcaaataaaatatcagccccattctcttcctcctctccttttggtattccaattgcacatatgttgggccatttgataatacataacagattactgagcctctattcatttgttaaaaaaatcttttatctttttattcttctccttggataactttaacctattttcaagttcacttactctttttctgttttatctccacttggttcttaagtccatcagctgatatttttttatttcagaaattgtagttttacttctaggatttctgtttctttttaaataatttataagttttttgtttgaaatttttcatgtattgaaagcattttatttcattgaggatttttataataattgctttgaagtctgtgtgttctagtatctggttcattctggagctgtattcagataggatttgggtctcctttcttgctctttgttttctggggctccccccagccttagccctcagtgttcatggttttccagcttcacttttctggttccccaggccagaaagactatttttggcttttctgtggcttctttgccactgtgccttagcttcaggataaaaattgcagtgacaggaacgtatttgtattgttccttgacttccctactgtatgtgagtatgaacttcataccagattctgtctgcttctatttactgtttttttaagtagttgccttttcagtctgttcaggttttatagttgttttctgccagagagaggttggttcagtaggttcttaaatccatcgtacctgagtggacattcatgttttagttttgaagtaattttaaaagcaaattaatttatactgttgctgctactctattcattatctattcataataaggaggattgcaagtaatttctgatatctatagatgtaagcactgagtaggaatattaggttcacaaatattttattattgaatatcaactctgagccaagcacttgtgatagaaagaaaaataaggcaaactactctcagggtacttaaaatctggtagaaacataaagggaagattggtgggcattgatttcactgacttccacatactaagctaaatcactttttgcatttgttcagccttattattagggatagaacttacttgtaaaaagaaaaaaaaattcaagtttttttacaattggagttaattgttactgttttgtttttttttttttttttttgcatttgataggctttttaaactagcttggtgaaagtagcttttttttaaaacagaggtctgtcttgttgcttcttgttccaagagtttagcctggtccttactcagaaacattgcttaattccatgacagcttattgttataaatttgtggattattttgccattttcttaagtactcttaaaaatagaaaatcctagaagagaactcgggaatttgcccgaatgtcgcaaaacttttctgataattgttcaaacaagggagttttaaaaattgttgtcccttgtgcttacaggttgattagagatgggggaaaatggtgacagactgggaactggagaacttggcttgattgcaaacttgaagaaacactctctcttagtattgtatgtgctctaggtgggcaacaaatgagagctcacagccagagcaagtccatgaaaaaggactgtggtggatttcattgtaaacgtgttcagtgttgtagggctcatctgggtcaaaaattaaagatgtttagtaatccaggaaatacaaaaatgatcagaagtaggcttctgatatgggacagacactcaggagcgaagtaaggatttgagatagagtcatccacttaaaggtgatagttaaacttgagaataggaggaggagagagactataaaagaatgtgcagaggtctctgaatccatcacatgacaaattgtatagtttctcactatcactttgtctaacccagaactttttagaaaaatcaactgaaagagaaactcgccaagaatatgccctggctatgattcagtgcaaagttctgaaacagttggagaacttggaacagcagaagtacgatgatgaagatatcagcgaagatatcaaatttcttttggaaaaacttggagagagtgtccaggaccttaggtgtgttattctttttaattctcatgtgctggatctgttgggctttgtttgacttgcatagcattttaagaaaacctgaatttgttgtcacctatacaaatcaagagagtccactaaaatacgttaatgtctcctgagaagacatcattctgacrtggcaacaattggtcagaactgtgtgttatctcttcttatttacggagattcccactgttttctgccgtctaaactctgaccggctttactccctcaggatgactccaccctggagctcctcgagtcttctcttagagtctttttaagcaacaaaggtagtttgttaattagtggaggaggtttgcctgtatatggagaaagtatttgttttcctgctttttgaaggccttttggctcatgttttaatattaaaaataatgtaaataatgtatgtacagtaaagaattagccactatggaagggactccatgccactcccaccatcttcactgcctcgcctcactctccctcgggtctcttgtgtttgcttccaaaaagccttctaacccctctctgcctgccccctacaacccacaaattgggctctgcatattcttttggatcttgttctttttctgtttcgtacataatatcttgatgatcttttccattaacactcatattctttgtttttaaattaccactggcatgtttttaaaagagttactctctggaaatagaaacttctcttgggtggattggggtttggagccaggctgattcttggaattgtttggctactttttccctgtgtggccttgcacaagtgtcttgactttttcaagtctgttttccttttggtaaaacagtaataaaaatgctaaccttgcaggatttgttgtgaggttccgtctgccctgcaaatgccttcagcatagtatgtgctccagaaatgtatttaccagatgattcagtacagccgtaatcccaaggcccaaagatttcccagagatgggaggtgttatctgtatcagtggtttgtaatggattttgtggaggaagaaaaatgatttttattattctagattttcaaatatttcaaatatggatacattgattataataggcaggccaggaataggcttcacagctatacattctgttcctatgtttattaaaaactgatgactggttctccgtaataatcatttaaggcctgtttttgcaaaaaataagattagtgatagctttctaaatgatttaatcaattttagctaattattattgattatcttgaatttggtaatttgaaaaatactatttacataaagctaatagggtgatgggtgcagctaaaagaggcttttctctgtttttgctgttacaggattaggatatgaatattaaaaatacttgtttacttcttatactaactggccctacattaaagtattgtactactttattcaaatggtaccctctgatcaacttatctagtacatcctggttataccgaattactagtagtatttgaatggttacatcttttataaatttttacttcagagaaagtccaagtatgttctgactgtgtttgtctactggctaaccacattaaacattttcctactgtaaagcttggaataatcaagttactatccagtgaatggtttttaaattaaggtgaattgcagtttgttatatgtacagaggcttttgtatttagtctgtaatggattaattcaattaattatgtctacactctttgtaatcacattgtaaaatattgtgccaataagtgtgattttgtttttgtgatgtattattacagtttatgatatttatagtataatatgagtttattatgttaaagtactatgcttttacataacatattattttgcctgttggtctgggaaatacagtatttcaagtgtcatggtagaaattctgattatcaatttttttgcttatacacattcatgtatatattggagtaaggattttgaaagcaagtgctgatttttatgtctcatacccagcattcaaatttgacaggagggttggaccttactacactgaataaaatttcacatgatttattaaagattrtttaaactgtttaaagttcgtttggtggtagtttkttaatgtacaaaggatggtcagtctttgtaattaaataataagtgaagacattttattttgcttaattttggagtactgtcagattcttataaaccttgaattcttttgaacatttttatagttcatttgatgaatacagttcagaacttaaatctggaaggttggaatggagtcctgtgcacaaatctgagaaattttggagagagaatgctgtgaggttaaatgagaagaattatgaactcttgaagtaagttttttgttctactttacactcttaatatctgttatcccaaatcctcaccaacactcgtttttgtcactctaaattttagatattctatggttttaatttgtattttcttgctgactaatgtggttgaatgccttttcatatccttttgaccatctggacatctcttcttggagaagtgcctgttcaagtctattttctttccttctacaggagttctatatgtattctgaacatgaagttgttgtctcatatatatattttcatcacagccattttgtccccactctgttgcatgccattttactttttaatggtgtcttgatgaagagatgctctaaatttcgatgtaggtcaattcatcagtctttccctgtatggctagtgcttttctgtgtcctggttaagaagtttttgcctactcaaggtcatgaagatgtctttatgtgatatctcctagaagctttattgtttaacttcttatatttagatacccagtccatctggaattgatttttgggtaagggataaagtaggaaacaggatttatttttttctttccatagatatctaattgaaccagccccatttattgaaaacacttccaccagtgccctccaggtttacctttgtcataataagatgactaatatgtgtaggtttctttctttttttagtgaggtataatttgtatagcatacaattcatctgtttaaaccgtagaattcagtggtttttagtatattcagatatttgtacccattgacaaaatcagtttagaacattttcattgcttcaaaaagaaaccccatatcctttggccgtcacctctctatccacccatctacctagccctaagtaaccaccaatatctcgatttgcctgttacagaartttcatgtaaatggaatcatataatagatttttttttgtgactggcttctttcatgtactgtaatgtgttcagggctcatccatgttgtggaatttatcactacttcattcctttttatggttgaatgattttccgttgtggataagaccacattttatttattcactcatcagttcatggacttttgggttgtttctaccttttggttattataaatattgccaataatacttgtggtatgagttgttgtgtgggtgtatgttttcatttgtcttgctgttagatacttgggtgtgaaattgctgagtcatatgttaactctgtgattaaccatttgaggaactgccagactgttttccaaagtggctacacaattttctgttcccaccaacagtgaatgagggttctgatatctccacatctttgccaacgtttattatgacctttttgattctagccactcacactgagtgagtgtgcagtgatatctcattgtggtgtctatttgtatttcctgatggctgataatgtcaagcatcttttcatgtgcttattggccatttgtatatctactttggagaaatgtctgttcagatgcttggctcattttttagttggattgtcttyttattacttagttgtaggggttcttcatatattctggatacaggtccaagatcatatatgtgatttgcaaatattttgtctcattttgtgggttatcttatcactttgttgatagtgtcctttgaagcacaaaagttttaaaatttcgatcaagtctaatttgttgtttccttagtttctcatgcttttggtctgttgccaaaactgatttactcccatgttttcacaatatttttatagatttagttcttacatttgggttcttgatccattttgagttaatttttgtatatggtatgaagtaaggttccaacttctttcttttgcatgtggctatcctgttgtcctaagtactatttgttgaaaagattgttctttacctattgaattatcttggcatccttgtggaaaatcaattgactatagacatgggtttatttctgaactctctgttggtcagtaagattactgtgatagtagtaccacactgttttgattgctgttgctttatagtcagtttggaaaacaggaagtatgactcttataccttttttctttttataaaaaaaaagagtgtatctttatttaatgagtctctaattggtagatattttaaattgttactagagtttgctgtcacacacagtgtgagaattactaatatatactttactacaacttttaaaatagactttaatttttagaacaattttagattcacagaaaaattgagcaaaaagtagagtgctttcatatgctacctctacctccaccaacacacagtttcctgtttctaacatcctgtttttagcattagtgtggtacatttgttacaattgatgaactaatattgatatgttattattaactaaaattcatacatagtttgcattaggattcttttggggaacctgccccgaaaatcacgtaggttcttttctattttcctaagtgtcagctggcttgagaaataaagggacagagtacaaaagagagaaattttaaagctgggcatccggggaagacatcacacgttggtaggatccgtgatgccccacaagccacaaaaaccagcaagtttttattagggagtttcaaaaggggagggagtgtgcgaataggtgtgggtgacagacatcaagttcttaacagggtaatagaatatcacaaggccagtggaggcagggcaagatcacaggaccacaggactaaggcgaaattaaaattgctaatgaagtttcaggcaccattgtcattgataacatcttatcaggagacagggttttgagatcaaccggtctgaccaaatttattaggcaggaatttcctcttcctaataagcctgggaacgctatgggagactggagtttatttcacctctgcagtctcaaccataagagacaggtacaccctgggggggccagttcagagacctacccctaggtgcgcattctctttctcagggatatcccatgctgagaaaaagaattcagcgatatttctcccatttgcttttaaaagaggagaaatacggctctgttctgccctgctcaccagtggtcagagtttaaggttatctctcttattccctgaacaattgctattatcctgttcttttttcagggtgcccacatttcataatgctcaaacacacatgctgtacaatttgtgtagttaacgtaattattacagggtcctgagacgatatacatcctcctcaactgacaggattaagagattaaattaaagacaggcataggaaatcacaagggtattgattggggaagtgataagtgtccatgaaatctttacaatttatgtttagaaattgcagtaaagacaggcatragaaattacaaaagtattaatttggggaactaataaatgtccataaaatcttcacaatccacgttcttctgccatggcttcagccggtccctccgtttggggtccctgacttcccgcaacaggattcactctttgtattgtgtagtttcctcattatgaacttttcaactttgtgtatagctctgtgggttttgacaagactatctttgctccaatgaattgcccttgctctgttaaaagatcagttgactatatttgtgtgggtctatttctgggctctctgttctgtttcagcgatctatttgtctattcttttaccaataccacattcttttgagtactgtggctttatagtaaatcttgaagttggtagtgtcagtcctctgactttgttgttctttaatattgtgctggccattctgagtcttttgcttttccataactttagaatatatggaaacaaacattagtttgtcagtatctacaaaataacttgccaggattttgattgggattgcattgaatctgtaaatcaagttgggaacagttgatatcttgacagtatagagtctttctacttgtgaacgtggaatatctgtttatttgtttcaattttctttgatttctttcatttggcttttgttttcctcttatagatcttgcacatattttgttacatttatacctaagtatttctctttctttctttctttctttttttttggtgctaatgctgatggtcttgtgtgtgtgtgtgtgtgtgtgtgtgtgtgtgtgtgtgtgttgttgttgttgttgtccaccaccctccccgccctgccctttttttttttttttttgagacagagtctcactctgttgtccaggctggagtgcaatagcgcaatttcagcttactgcagcctccgcctcccgggtgcaagattctccagcctcagcctcctaagtagctgggattacaggcgcgcaccaccacgcccagctcatttttgtatttttagtagagacggggtttcaccatgttggccaggccagtctctaactcctgacctcgtgatctgcccacctcagcctcccaaagtcctgggattacagatgggagccaccatgcctggccttcccccgcctttttaagaggcaggatctagctctgtcacccagattggagtgaagtggtgcgatcatagctaactgtaacatcaaacttctgggctcaagagatcctcccatctcagcctcttgagcagctaggactacaggcacataccaccatgcccggctattttgtttttgttaaatttttgtggagatgggatgtcactctgttgcacaggttggtctcgaactcctggcctcacagcagtcctcccatctctgccttccaaaatgctaggattataggcatgagccaccatgcttggcctagtgctgtgtttttaatttgaaattccagttgttcagagatagtgtatgggaaaacaactgactcatagatgtaccttgtatcctgcgactttgctgtaattatttcttttatttccttttttgtcttattacacttaatgatacttccaatatgatggtgaatagagtgatgagagggtacatccttgcgttgcttctgatcttagggaggaaagcatctagtttctcattattcagtatgatactaactatagatttttttttttgcacatcatctttatctgataaagttgagaatgtttccctctattcctaatttgctgagagtttttatcatgaatggatgttaaatttgtcaaataattttcctgactctattgatatgatttttcttttttagcctgttgatgtgatgggctacattaattgattctcaaatattacgctagccttgcatacccggactcaatcctgtttggtcatagtttataattcgttttatatgttattagatttgatttgccaatatttttgttgaggatttttgcatctatgttcatgagagatagtgctctgtaaatttcctttcttgtgatgtttttttctgattttgggattatggtaatgttggtctcatagaatgagttaagaggtgttcccgctgcttctttttctggaagagactgtagagaattggtattgtttacttcttaaatgtttgacataatttaccagtgagaacatgtgggcctgttgctttctgttttgtaaggttattaattactcatttctttaatagatacaggcctattcagattatccacttctccttaggtgagcactgtgaaggccacctaacttccataagactggactccttggggtttttatttctctagctagttcttgttaaatctttagcaatgagtcagttaccctttaagtgtttctaccagttgatagatccaacagcagtttctgctgccaataagctttgattctctgtcacccatctctctagcttccagggagatggtttgtcctgggacctcagttctctgatggttcctgatggatctaagaagacttgttttgttcagcatttttttttttcctgctgtgaggattggagtgatgatttccaagctctttacatgctgtaccagaaactggaagtctgctcttttgtttccaagatgattttggctatctgggtcccttaacattttatatgaattttagaatcaccttgttaaaatctacaaggaacccagtttggactaatagggattctgttgaagctgtaagtcagtttgaggagtatttggtattcagatccatgaacctgggatgttttctgatttgtttacatcgtatttaatttctttcaacagtgttttgtagatttcagaatataagttttgcatgtcttttgttaaatttatttctaaatattttgtccttttgatgctattgtaaatgaagttgttttcttctttttcaattatttattgcaagtttatagaaaaacaattgagttttgtagattgaacttatgaaacctttgtctttattggattcctttgcatcttctgtctgctgttggcccttgaaaatgcaggaattagggatgccgaccctcctcccccacagtcaaaaagccgtgtataacttttagcttccccaaaacttaactactaataacttcctgttgactagaagcctcactgataagaaacagttgattaacacatattttgaatgttacatgtattatatactgtattcttacaataaagtaaactagagaaaaaatgttattaagaaaatcataagaaagagaagatatatttactgtccattaagtggaagtggatcattgtaaaggtcttcatcctccttgtcgtcatgttgagtaagctgagaaagagaacatgttgatgttgctgtttcaggggtggcaaatgggtgtaagaaaatccatgtgtaagtggacctgtgcagttcagatttgtgctgttcaatggtcaactgtacaagattatgtcatctgtgaatagagagttttacttctcactttttcaatctgagtgccttttatttctttttttttgcccagttgccctggttagaacctctcctatgcaaatgtgtttatgaattctttgttctattccatcatctatttgtttattcttactccaatactatgttatattaattgctgttcattattttctgtcttggtgtctgatagtatgagcatgagcatgcctgttcttccaaggtgtcttggtgctttctggactcctgcatttctgtatgcattttagaatcagcttgtcaaacaaatggtttgacgggtatttcgattgggattgaagccatagtttattctagggggaattgatattattttaatttggaaggagggtcctccaatccatgaacatggtagtatatcccttcattcatgtaggatttcctttggataatgttacactgttgtctttcattaaatttattcctttgtgtgtgattttttttttttagtgttcctatagatcttgtattacagtttttcaccttctacctcaacttcattggaactttttgtgatgatagaagtagtttatatctgtgctgctcartacaatagtttgtcactaaagagcactggaaatgttcttggtagctgagaaactaaatttttatcaatttaactttaaaacaaaccacatgtggctaatggttgtcatatgaggcagcaaagtttgagtctggtatctaaaaataccggtataaatagttctgtgttgtaaatcaggttgctccttggcttacctccctgccagcttggtatttggttttctcatgtttaacatttgttcttctgactttccgcttcaatattttattgtttttgtttcacttcccattttgtccttccttatagatttatacttttaagaaatcctcttattgtcatttaaatgaggcatccagatggagcatttttaggcccacctatctctgttgtttagactccattttctgtgtattactgaaaatgatacattattctcatttaaacaaaatggcaaatcaaagtgagtggttgatgtcagcaagactgacagaataggaagtgggaaggagtggattagtttttcactgttaccttatgactttgagttttaacaacagaaagagcttggaggttttttttaaatctagtgtttagaaaacttgaatrtagtggaggggaacgttttacaagttattacaaaagcattatgcatatctttattatgatacacttaaagagacttttgaaaagggtactttctattttctggtgttaggttttaatttttgtggcttcttcagattactccctttacctttgtatgacactgtgatttttctgaataaccaggaacaatggtatatggtatttttcttttttttttttttgagacggagtctcgctctgttgcccaggctggagtgcagtggcgcgatctcggctcactgcaagctccacctcctgggttcacgccattctcctgcctcagcctcccgagtacctgggactacaggtgcctgccaccacacccagctaattttttctattttttagtagagacagggtttcaccgtgttagccaggatggtctcgatctcctgacctcgtgatctgcccacctcggcctcccaaagtgctgggattacaggcgtgagccaccgcgcctggctagtatatggtatttttcttttatgtttatatgatgatgagaaatttgaaattattgtttgtttgtctttagtttttattcttgttaatggagaaaccaaactccgtgaaatattttaaagaggcttcttctgagccaatatgagtgaccaccatcttgggaaaaacagtcttaaggagccctgagaaagtgtagctgatttctgttttacattaatggtggccagttgtgcctaaactccgaaagggaaggggtattatgagttttttctgatccctcttcccatcatagcctgaaactcagtttttgaggtttctctggggtccccttggcccagaagggagtctgttctgtcagtggggttgttaccagttgtgaatctgtatgggtctgcagcaacgtgatccttgcctccttggaggaaataattctgctgaggggcagaaataggtttaaggcagagtaagagaccagggcaaattttagagcagaagtgaaggcttattaaaaaagttttagaacaggaatataaggaaataaagtacacttggaagagggccaagtggatgacttgggagatccaactgccctgttctgcccttgacttggggttttatacattggcatagttccggggtttccatttctcttccctcgatgtttcccttgggctgggctgtcatgttcagtgtcctgccagcacttgggaggggccacatgcacagtatgtttactgaagttgtgtgcatgctcacttgaggcatttttcccttatcagttgagcattcctagaggaaggtcatatactggttaaactctgccactttgcaccttactgtgcatgcttgagcctgcccaccccactcttgagatattattgggaagctgctgatcaccagcttcaggtgttttctatctgttggaagactgtcgttccctggcaccagctgcaaccaattattatcttagagtggcagcttaacaaccccctgacttgatggtcacctgacattctttacattcttataaattatatgcatgagatgaatgacaggtactagtgctgcccaataagatagatctggatgaaatctttatttgattctgctgtttaaaaagcatcatgcatactggtcttccttttatctgtggataaccacacttacgtcaggtaattccacacttagcaagtataaaagttaatttttccctctcacttttgaagtatacagaaaataccttgtagcttgtatgttagtagttttgaaataaatatatattttgagtaagaaaatattctgaaatataagaagccgtggagatagaagaaaagcaaaaactgagagagaaaacaagtttctaaaactgaggaaaacattgtgaaagagaatgaacatatttgttgaatgatcaattagaataataatgtaaattctaatttgatttgaacagatgcttttcaagattacatttctagctaatgtcgaggcagaattcacatttggtctaactacagagctgtggtgtgttgctgcctggatccattggactatttgatagaatcatgggttgtggttaacgtggcaatagaggtttggattgtggttgatgaatctattgttgacttaactgtattcagagacatcttggagggagttctctcattgcataccataaaatgtctttttttgaacctgttcttttgaagaacattttaattgacgatttgacacagaaatagcatgctcagcaggtttacagctaataatacaaaaatgttttcattgttgctgaagatattcagtggacttaatggtcctgaagggtaacaattaaaatcatgtccacattttgcagatttgactagaaagcctgtgattccttccagttctaacattatctgactctaaggctgtgcttctcaaatgttaatggagatcttgttaaaatgcagattctaattcagtagtcctagattagggtctgtgatcagcatttctaagtaaccaggtgatgcccatgctgctggtgtgtacaccatattttgggtatcagggtctcagccatatggagaatggcttaagtcactgagaatagtttaaggcagggattggcaacgtgatttgggaaagaccaaggtagtaaatattttagactttttgaaccattttgtttctgtcccaaattactcaactctgccattgcagtgccagctatggacaccaagtaaactaatgagcctggctgtgttccagtaaaacatttacaaaaacagatggcatctgggtttggacttgagctgttatttcctgacttctggtttgatgtattcagaatgtcagtcttaaataacgaaattctgaaaataagattaaatacagagattgttcaagctcaaagcttgaagatggctacctgggagcatagattcaacttgccttgaatatgcactccaattagtagcagttacaagtgggcttttaagggaaaaagaagaggcacttcctaagtcgtttgccaagaatttacattaaaatgacataaactgttgattagctgtacattgatctttgtatcacaaattccaggaacacgagggtaatgagtgggatagttagggacaaaatgcctttaaataattgcccttggacccacactcttgtttctgggtgtgaaaaatgttatatatttcacatagctctgacgactctgagctatttttcttttcttgagaacaaatgttatattttaaataattttcgttaatgcaatttgcttataatttcataaaatttcttaatatttaaattattgaaataaaaacaaagaagtaattttttgaaattatcaaaatgtttcagttgaattaaatttaatgtaattttagaataatttgcaagttagccttttaaaaacacacatagtttgaaatgttaaaaatattaatagatatatgaaaaactgaatatgtcttgtttcatcttgaaggcagagagaactaaagtggaaaggtttcttcactgctcttcaatctcagactcttcctgaggaggaactagggtcagcaggccatagtctcttccggtgcctaggcataccttacctacatctttatatacctttacttatacatgttatcagactaaatgtattaatttgtgacctgtcatttttacttcctatggcttgaagtcatttaacatgactgtcttaatacatattacaatggcaggtggtgattagtactatgaagaacagtggagtaggagaggagaatggtggggagagtactgccttagggtaatcgtgggctcttatacaagagatgacatttgagctgaaaactgaatattgtgtctcagtgtactagtgggttcagttggctaatttaagtttgtgtgtatctatttctgagttgctggggtattagaaagagttgtttttatatattggtcttctaccaagccatttaaaaaacattcattctgactggttatcacagttacgctctgcttttagaatgaattgagaagttttccatctatttctaggcccttgagcattaaaataacagaggagcaacctattccttgaatgatctctgcttgcacacatgaggaaggtagtcctttccaagctccttggattctgagcagcaccatctccctcccctttcactcccaagggcacatgcacatcttgggtagctgcacccaccctcagtggtccttgaggagggtagcagaagccggggcagggggagccttctttgctgctggttcctggctcctgttctcagaagtacccgtcaggctccagtgacaatttatgtggttgtattggagaaagtaccagaagggcaaggtgacaggatggtggatttgggctgccatcttttctcttgctgttatggacttcactgtttggaaagtatatgttccactcttctgttagagttggggcaagagagaggggaagacgtgtgtgcttagtgctcagtccaccctcttatcatcgagcactgaaagtcacttgtcccagtagtaccagtaggtcctagggtttataaatggcttatgaaaatatatataattggaaaagatctattggtagttttgtgttaaaataacttttattcatgttctagttttcttgaggggggagtccctgatattttggaaattgtgcatggtgtacattgtgaatctgaaagaaacttgttatatatgtttgaaggtttgaaaactgcaaacttatgtctaatagtgaaatccttagaagaatatgaatatattaataaatgtctattttcaggaagatatcttcattatacctgtgctctgttgtagtctatagaaaaattagaacttgatctctctttggataaaatttatttcagaatcttgacaaaacttttggaagtgtcagatgatccccaagtcttagctgttgctgctcacgatgttggagaatatgtgcggcattatccacgaggcaaacggtaagagaaagccattcatttcatttggtttcttgaaaccttcagtgtagagtcctaaataatgtacttatctaaaatggagtaggttagcaaaggaactaacaaagcaaatgaaatcaagattgccacaatagtgagaattatgataaacccagttaaaaatgagtagtataggccggttgcagtggctcacgcctgtaataccaccactttgggaggccgaggcaggcagatcacaaggtcaggagaccatcctggctaagatggtgaaaccccttctctactaaaaatacaaaaaaaaaaaaaaaagaaaaaaattaactgggcatggtggcacgcgcctgtagtcccagctactcaggaggctgaggcagaagaactgcttgaacccaggaggcgaaggttgcagtgagctgagatcgtgccactgcactccagcctgggcgacagagcaagattgtgtctcaaaaaaaaaaaaaaaaaaagaaaagaaaaagaatagtataaaaatatatcacgcctgtaatcccagcactttgggaggccgaggcgggcggatcacaaggtcaggagatcgagaccatcccggctaaaacggtgaaaccccgtctctactaaaaatacaaaaaattagccgggcgtagtggcgggcgcctgtagtcccagctacttgggaggctgaggcaggagaatggcgtgaacccgggaggcggagcttgcagtgagccgagatcccgccactgcactccagcctgggcgacagagcgagactccgtctcaaaaaaaaaaaaaaaaaaaaaaaaaaaaaaatatatatatatatatatatatatatatatatatatatatatatatatatatatatatgtacgctggtataatactactgtgtagatcacattagatatttcatgttaatgatttggtagccattttgcgagcactggctattttttgtcttactatttgtacttacagagatgaatgaagcataaaatatttacttatctggcccttaggaaaagaatcgccactcccacccccaccccccgtaacctaatcataagggaaagggctgcttggttagtgcttgccaagtctctgtgtagtgactcacgcacactaaagacggaaacttaatggatttctgtaagttttgcagaagtacgcttgtcccttttgtacttggccctttcagaccaaatacctggatacaattaagggatggttaaaaaatagtgaagttagctattggaatggggcacatagattttgtagcagtggaaggataacagcaacctcagcatctgaagaatacctcagaccctggagatacaggggaggtagggacatcaatgatctttgtttccagtgaactgcctctagagctttcctcaaaggaaaacagagagatctcccaagctgttgccagtgccttctgtttaattgagtgctgggcctgtcacccactgcgaggcagctctcactgctataccatggccactccctttaaccttactgaaaaatttattgggaacagaagagataatggtagcccctgcaccccctaagcaaaatgccagtcaacggctctgtacttccctaattccaaagctatccctcagccattccatggtacggacaaatgtcctctggctggtggcatagacaaataggccagtctcgccttaaaataaggactcaattatttgaactgaactcagactcctaaggtttatcatccagctaggaggccacycagcctgtttcactaactcatgaaggtcccacttgggtggccccagcaatgataaaccactttccaggggcacaatgagcaccctggtattatacttcatggaagccaggcattaactcatcttcttctcaaagagacaataagttgcgctttaggggtgtggtcataaggaaccttcaagtatttcaggaaacgctaccagtagattatgtagtcctcagacaagtgtagagagctctgtaaaaggaggctgtccttgtagactctgatgattcgttccatttgtttaggtggttgagtccagggccctgggggacatgggtggtgaggtcagtgctgcaggttggccttatcctggtgcttggagtcttgtaggtagtagccttcatgaaatggcatataaaactaattaagtggacttggttccagcctgtgccagccagattcatcagaaccacccacaagtgttgtgtttatagatacattttttggaaggcaagatggtgtagaaatgaggggttgatactgtaggaagacatttctcatgccttccttttttctttgtttcccaataagccttttgcactcctatctctcatctttctgaacttcttgcaagacgaggcactaaatgccctttacagagaggtttgtctgcctaagagcaatgggcagatgtgcttactgccatatgagagattggggtttctctaagttcagggttcctcttatgcgcagtgtgcagggctcatctggcttcctttatgttcacttgtggaaattgaggcttgggggactagcactaaaatgctagtatcttgctatttctgttgctgtgagcaataaactatcctttgtctcggacccaggagtctcatgtgttctaccgggatccatgaaactgtggcaggctaacttgttagctgcaagtagggtaaaaactaagaccctcatagttgttgacactgtaatatcaagagctgtccaaaattaatatcattaaaaaataattggttttactatggaaaattaaagatctttagataaggcaaatataaatttagctaataatagtcaaggtctataactcatttaaaatgtgttaaatatgaaaaacagatggatagatggtatatagagccctcttagatttatagctgctaaaaaatgaatgaagataaaaatatgatagttttaaaacgctgaaagtgaaaagcatgttgaagaattcatcttctcacagcactgcctcagctggtgtttcaaatgtttcttttggatatgttgtgcacacctgacctgctgccaaggcagaagcctgctatgccttcacgtaattctgctctactgccctgttcctttctttctccctgccttactgtctctccctaagaagaatgatctctcccatcatgctgtaccttcatttgacttcctatcaccaatatctgctgcagtcgatcctccgtgcttttcctaaaatagtcttttttggcccaaaactgtggccatgctaattcttttctatgtccttccagtggcttatatttacatcatggaccaatatagtcattctttattctgaagcctctcaccagcataacttactttctgtgcaagctctggatccttctgctttgagatatgttttcaaattattttctcctcattaagactctgctttttgaaacttctcagaaaaaaaaaaaaaaggcatggtttctctcatggttatagggttgttgttttttttttccccccaaactttatgggtgttcagtggatttgcagatcaacaatttgaactaagttttctaaaagattaatcataatactcaaacattttaaattacataattctttcatgtcaagtattggaattattttgtttttgatcttttaccaggttatctagaatagacttattgagtcataagaaaggatcgctgggtgcggtagctcacgcctgtaatcccagcactttgggaggctgaggggggcagatcacgaggtcaagagatcgagaccatccttggccaacatggtgaaaccccgtctctactaaaaatagaaaaattagctgggtgtggtggcacatgcctctagtcccagctacttgggaggctgaggcaggataatcgcttgaacccaggaggtggaggttgcagtgagctgagattgtgccactgcactccagcctggcaacagagcaagactccatctcaaaaaaaagaaaaaaaagaaagtatctatactcagtttcttttcttaccctttattgctactgaattagaaaatgctaacttactattatcatttggcaggaatggctacaagagttagaagcttggccagagagtttgggatattcaggttatatgcggatttctcacagaagcccagctcagcacttcatcagacactcagttgaccagcccattcaaacaaaagcaagaaaatagagtgttgcctctagtgaggtatcaggagaaggattcccagcctacttgttggtcgcattcagtaatataaaagcatttcttcatattcaaaagttgtagctttttgatatgattttttaccatagccctcattaattttttttccttatgaataaaaataaaactttaacacttagaaaaattcacatgctttgtgatagatccattttcaccacaagtcagttatcttaaaaaataattgtggtatctcaaatttgaggttgatatttggaacttaaatgataggtttaacctattcaagacagcaactgttgctaagatatgccacttaaagtcacttaaggtgatagaaatgatctttattggccgggcacagtggctcacacctgtaatcccagcactttgggaggccaaggtgggcagatcacgaggtcaggagttcaagaacagcctgaccaatatggtgaaaccccgtctctactaaaaatacaaaaattagccaagcatggtggcatgagcctgtagtcccagctactcaggaggctgaggcaggagaatcgcttgaacccaggaggcggaggttgcagtgagcctaggctgcgcgactgtactctaatctgggtgacacagcgagactctgtctcgaaaaaaaaaaaaagaaattatctttattggcattatcagtaaaagtctgtctcctgcattatattctggtaaagctaacagtgaccattttctattacctcagtaaaaataatgccagtgaagaagttgagtttcaagttcttatttaaaaaaagtcgtgcacttctgattggaaaagcagttttatactccctattccttccttcaaacagcttctcatatgcttctaatgtcatatttgcactttggactatttcaacagtagcatggtgaataggcacatcacggacttccaattcggttagtacagcctttttatccacatagccgtaactctgctgcacatagctagtcctttgtcagtgccaagttcaaaaaactgcttccagtccagatcatgcaagagttagaaacttgtccagagtttgagatattcagattatatgtggacttgtcatggaagtctacctcagcacttcatcagacatattgtttttttcatgtttacacagtacatatatggatagttacttagcaacacggacaccaatgcagagtcatgcagtgggtaagtgcccagactaaactcgcctgcttggttttcagatcccagctcagccacctagtaactgtgagattgggcaagtccctttacctctctgtgccttggtttcctcctctgtgaatgtgaagagtgagtgagttaatactcattgataataataatgtaaaacacttagagtcatgcttgctacatagtaagcactctttaggtgtttgctgaagcaagtaaatcagtagattgttcaattgtcaagtaaagtgtctgctacttcaagcaatagcagttgttcttctacactctttttgttatcatgggatttttcacattaaattttgcttctctaagaacatgtttgtcattaacttctcggtggacttttttgtttttacaagtttctcaggaatgaagtgtcagaatgttgtctcttgcagttttgtccttttctcccatctctatctccatcaaacagtaacctttgtcggttgacaacattttataacaaaaatattctggagatgcaagtaaatgttttgctggtccactgatacatttttagatacagtaagccctcacttaacatcatccatacgttcttggaaactgagactttaagtgacagcaggtcctcgaataatgtcctttgcttgttttatgtcgttttgcttgaagtcagtttccaagaacctattgatgttaagtgaggatttagtgtactgaatatcacatttcctatccatccttttctttgatcactatcaggtttttctcagtgtgcatgtttacatctagtttttaacgtggaacccttttcactcttgttttacatgtgtgttattttcatgactgcttttgtagttttaagaaacacttttgatccaattacttgttttcgtaagattgggtggagagcataacgtgacagttaattgccccccagttgcaaatttaatacttgtcctcaataaatgcaatgacacaaaaataaaacgaatttaccttatcaactgtactggccagttgagttcttttaatggacttgtaacctttaatatggtaacatgattctgagaatcaaacacaatttagcattaatcttacttttcaaaaatacatgatgttcaggaataaaactgttccattgctttttcttcaggaggcacaaaacacctgtggcccctgatagaagtccagaaatcacaccctgatgattaatgcctgacactcaccttagggaatgtgctccctctgcatgtatgacttaatagcacaagtctggcataatgaatgttgttctaataattaaaacattgtgacaatatcaaagctctatcagactctcttacatggcttgtacagctacacttttttttttttttttaaaggagtctggcatctaaaccacctttctatattccaggaattccccattttacaaggcttgtaatccctcccattatagaagattaaaaatgccacaaattcactttgctcttctcccttacatttagccacctgcccgtggcctaaaagctcagttataagccgatgtagctaccccagacctccagcaggaacgagagactggggaagcagggatagccagctccatgaggaggagaagaggtggcagctctgggtagctgggtgtgaacaaagtaagctgtggggtcaagggccgagctgaaacagcaccctcactgaactacttgattttgatggtgattcagcctggccagccctcgagtacaattgtccagtcttccaagccatatgcagttacctttcaataaattattttgctggagaattatcaggcagggtaaagtttttgttacttgtaactaaacatattcactgatataagagattcttctctgtttaatctgacaaactgtactgcctttgaatctaaatacaaatgtccaattttctgtgctcccacaggattctgaatatattaatgcttccattatgtaacacttttcastttgtacagtgataatgtgatgaagtctgtttatctcactagactgtgaacttctcaaaagagccacctgtatctgactagacatagtgttcaccacacagtagggcataatacttgctgaaggaaagagctaccaaaagaatcatgtttgttctgttaaaatacagacttttttatctggtaaatatctctgtgttcctttgttcaaagcctagcacagcatgtgtaaatacaaattaaattgtgttgatagtggcacaaaccttttattgaccaaactggtttaatttttctattttaacttatagtcatcatgaaaagtaacaaactctcattatagaaaacttgaaaaatacagaaaagaataaagaggaaaaagcaacacccttaatactacaaagtatgagataaaaatgattttttagttttttccccatgcatatatagtatgtattttttcttctgaaactgtgatatgtgacatctcctattttatctcctgcatttcctcatttatcatgggtattttccatctacagagttttaaaaatatggtttaatgctatgtataggtacacatgctctagttcactcaaatcttactactgggcatgcaattagtttccaaattttcattattaagaaaacagaattaacatctgtgtgaacatttctggttatttgctggccccttcaaatagatttaatgagatgatatgagtacttttgagattttaataaacattattgaatatagactaattcagagtccccctggcagtatataggaataccatttacaccaccttttcagcagcactgaatactatcattacctctttatggcatctggtgcttttagtttatattttaatcacttacatgatccgtaggaatatttgttgagtcttgccccatggagcttacattttactgaaacctttgctgtctctcccaccacttttttttttgtttttgagatggagtctcactctgttgcccaggctggagtgcaatggcgtgatctcggctcactgcaacctccacctcctcggttcaagcggttctcctgcctcagcctcctgagtagctgggattacaggcgcccaccaccacacccagctaatttttagtagagacggggttttactgtgttggtcaggctggtctcaaactccggggctcaggtgatccacccaccttggcctcccaaagtnnnnnnnnnnnnnnnnnnnnnnnnnnnnnnnnnnnnnnnnnnnnnnnnnnnnnnnnnnnnnnnnnnnnnnnnnnnnnnnnnnnnnnnnnnnnnnnnnnnnnnnnnnnnnnnnnnnnnnnnnnnnnnnnnnnnnnnngggcaggagaattgcttgaacccaggaggcagaggttgcagtgtgctgagatcatgccactgcactccagcctgggcaatggagcgagtctccatctcaaaaaaggaaaaaaaaggaaaaaaaaaaaaagagctttctctttattcctcctttagtcaggtaagtaaaaaaaataaaaaagagtgagaagagtgagcttcctcacttagaaatctgataaatattctccaaaattatctttttatttttaaaaacggtaatgaccttcctaattaaggaaacgaaaataggcatggtttctgtgctcattgaatttataactctagagggtatattgctacacagattaaaaaatattgactttcatataagtagcattgtgcaacttaaccatttttagcaatatgagtggaatcataatatgttatagtgtgatatcattttattagcttctaaacagccatgtttagaatactaaacaaatagaattcttatgaggatattttatgtaaactcatctgaattatttatattaagatagaaaaagacctttagaacaaacaaaaatagttctgtatgttttagaatatttaaaagtttactctcaaattacattttttggtttcatcagctgctgcattctttaaatgtatgtaccagtgctgaacttgttaatcatatttcagaatattccaagttcttaaagcttaacatgctattgacttaacttgttttgaaatatggttagcaagattacccctattagacaatagctcataaatgaagtacttgactctagttctaaaaaatcatcaaatatcttgtctttttaatgatattttgtaatccaccagctggaaagattcttttctcacctttttttcaagcattcatgatattgggcatttgtataatctgaaaataattggtgcttcaattgcatcttgagaagatgagaaatgtctgtttatttcaatagcactgtgagtttcagtggggcgagatcatccacttggtatgagacccactgggctctggggtggagagtaataaaatgtagtttactaaatgcttaagaaataaacataataggatgggtgcggtggctcatgcctgtaatcccagcactttgggaggctgaggcgggtggattacctgaggtcaggagtttgagaccagcctggccaacatggtgaaaccccgtctctactaaaaatacaaaaatgagctgggcrtggtggtgagcacctgtaatcccagctactcgggagactgaggcaggagaattgcttgagcctggaaggtggaggttgcagtgagccgaaatcctgccactgcattccagcctggctgacaaagcaagattcttgtctcaaaaaaaaaaaaaagaaataaacataataatatcaatcattaaaagcttttcaaaattttattggctggtgataataagaacaagggtttagaatgtcaaaaacactgcttttgctaggcagtattatttgttgtgagaattacatgagatgaaaaatatgaacatttagcacagtgcccaacgtgggggaaagtgctcacatttgatattactgtaagtggtgtgtgagctgtatgtttttaatcagtcctattttgctcacaacatggcagttttctgagattgtatttggtcctcattattcacaggttccagaattgtgaatttgcccacctactaaaaagtttattttcaacagctgtgtcaatactagaggcgcttttgtagttatccatggacatgtgtagagtggtgaataattggagtcgctaatggacacatccccagctgtgggggaacaaggcagcgttctgccatcccatgttgtctcttacgctagaaacaagcgtcctttacgtggtctgtttagtaccatatttttttttttttgcatttttgtggggtttttgtgtgtgtgtgtgtggtgattttcctgtttaaaatggcccccaaaccttctggagtgctgtgtaatgttcctaagcacaagaaggggctgttacgtgcctatggagaaaactcgtgtgttagagaaggttccttcagccaggagctatggtgctgttggctgctagctcaggcctcagaggcagtctagagaacaagcagcctgtgaccgtgctctgtgaagctcagtggggctccaaagctgactgtgaaaggaccttgtcagctattttaaggatttgggtcctttgttttatttttatttgtttttttttaagaaacagggtcttaccctgttgctccagctggagtgcagtggtgcaatcatagctcactgtaaccttgaactgggctcaagcaatcttcccacctcagcctctcaagtagctggttctacaggtacacaccaccatgcctggctaattttttattttaatttttttgtggggacagtatctcattgtgttgtccaggctagtctcgaactcctgggctcaagcagttgtcccagcttggtctctcaaagtgctgggattacaggcatgagccactgtgcctggcctgggtccttttgttaagacaagtagaagccactgaattgttttaagtagtaaaaatcatatgcagagttttgccaagattcctttgactacagtgagaatgggaggcgggagagcagcctgtatcatcatcgctgcacagctgggcttagtgtcctgcagggacataggctttatgtcctttaatcatcacagcaacgctgtgaagatgtccttgtcttccctatttgtcagggaggaatttaccaggtaaaggacttgtctaattaacatgtttgataaatggctgagctgatatattagataatgttttaaagtacagtgcctggcctgcagtaagcactcagttaatgtttgatgatagttacattatgttcttttttttcccctcagttcagtgcattttttttaaaaccatgctttaaagaataaaatatgaaaaggtatgcagataaaagcttccctctcactccgacccccatctacttatttcttcctgaccccagaaacattactgatctgtgagattgtcttaaaccaccaaacactgtactgcattaaggtgccgcttgtcactgactatattgtaggtatcctccactagacaggactggtggctgaagaatggacagggcagtccacactgttgtgtggaagctgagactccacagctctgtctgtaaccacacctttgcaaagaaacagaggaccaatttctatgcatgaagaaatagccatttttactttcctttgtgtttgtaataagtggattttcaggatgtcggaagtgtggtgatagaaagcagtgtcggttgtcagtcatctcggtggtctcgaagatatgaatgttctccttcgtctcactgcccaagtcacatggcatatcccattgttattacaaaggggtggatatcttaaaatcagtagtcttttccaggaaattagcatgggtgctctttaaccccctgttccctgctatctacatctaagcccctatcttcacgcagcacggtcactggtgggcttgatattgattgtatgttgttatgaaaattagatggtgttcaatactgatattaaacaagcaagaaatactgataataaaaacgttaatactcagccacttagaaaacaatgatctaaaatactagtgcctgggtggtatctaggcagatcatatgtttctggattagagatgagaaatgagaacaactgttggatttatcattaggaattcaaaaacgaaagtatttgaatactgtaaatctatggttcagggaaaatgatgtaaaaaaagacacgtttggtttatttacrtacattgttactttcctttttagcgtgttggtatttgagctgcctgcttacaaactgtgaatttgagagtaattgcatcttcctcaccacgtctctcccgtttgcagggtcatcgagcagctcggtgggaagcagctggtcatgaaccacatgcatcatgaagaccagcaggtccgctataatgctctgctggccgtgcagaagctcatggtgcacaactggtatgccacggctttttgctcacacttgtacattagtctgcaaactctcacttgccattctaaaagttcttatgcaaatgctttgaatgatcatttttaaaattagttattttgattcaaaatttagaaatatattttagtaattcagagcaatgacacattagttttataaagacggactgcactaaaggtctcaaggagtgtatattcaaaataataatttcaaaaacgactccagaagtaactaaaaggaccctgtgacataagtcagtcagtcctttttggagctgaatgcagttggactactgattcctttagagacgccacaattttgcaaggcttacctattcagcatatggtaaactggatgaattttaccaattcacataaaaacactaaaagctgataaatcaacttagattcagctctcacatttcattcactatagtttttgcttttgaagtaactaaagttatgcttctttattgcctgtttttatttttaaaataaaaattagtgacttttttgtacccacttaaaacaagatcaattaaagagtaactacttagacatggtgagccctttgtgtacataatagaagaaatgaagattccccttgacatagctgcttttagctgtaggttgggtgttcagtgccttcagcagtatcctaaacagttcaaatgcctctccattccccagcctctggaaggatgctctgtttttttgttaaggcatcaggaacaaatatacattgcttgtaactgacagtaatgctaccagcacttccaaaggagagggttagtgatgcactagcatgagtgcgtttgaagatgcaggcacatacagtgtaggagaatatccaggagtrctgctgtggtatcatgtgttacatattacgttcctgccacttaacacttttatcataaataatgacatttatgtaaattcttacaagtgctttttgagtgctagctttgtaccctgataagtgtacaaatctgtaccctgataagttaaatgatgttaggtatgatgaaagtgggtgcaactttacataggatgattagagaaagcctccctgagtaggccacatagctaagttgacaataatgataagtaaccagccatacagctctattactggagtgaataagcattttaggtggagggaatgagaggtgaaaaggctgtgaagtagtaacgaacttggcttgtttaaagcaatgtacagggaattatgtggttgtgacactcaggggtggaggtgctactggcacctagtggatagacagctggagtgctggtaatatcctgtaatgcaggcagtccctagaattaaagaagtatatgtgagtgccaatgttgggcaactctgatatgaaggatggtcaagggcaaactctgacatgaaggatggtacgaggggaaaaacatggttcaggagaggtaggcagagacctgatcgtgtagggccttgtaggctataatttgactcctgtaagatgagttgaaaaccattgcaaggatattaaataggggaatgacaagatgtggtttatgttttgaaagggtcactttggctactccctggagaacgggttgtgcaagggtaagtgagaaagcatgaagagcatttgagctggttttcatggtagtctggggctgaggtagttggtggcttggcctagatgataaacattgagataagaagtagatggacttggggtagattcagagctagtgtggacagcacttgatgggctgaaaatgttttttacttttttccataacttcagtgcaagaagaatgggatcaaaacagaaggtgaaaaccccagaatggtttttatcagtttagcaggaggaaaaacttcaggtctgtcagtaaaacataggatacatcacaggatttctctccttacttcactttaccccaagccagatttttcaacataaatcatttatttagtaatttcatatcttatggtttgtttatatctctttcaggaatttaatttaaaggatgttggcatttaatagaatttcaggccattgcaaccaatgagcttatagttgccagatgtttttctaaagtttctgtgaaagtcaaagttttattttcccattgtgttgaaattagggctattgaaatacagttattattttattagcgtatttctcttgaagtctttcttgttgggttagtggttttcttgttttaaaaaatgtatattcctaatatgaaaggcaagatgtgtgtgaaataggatgttgaccttttccctttgccagtggaggaaattttttagttgagaatttttgttgttcagatgatcatgtattgaagatgaaatttttaaatttgacttttttcttgaatttaggaacttgatgtagtctcatagtacatttttctgtgtgtgattataagaggaagtgtattctgtctttacagggaaatactggtttatttgctctttatgagagagtattcttttttcctctctctttctaattatatggcaaactttttaaattttaatgttttaactacgattatctcctttgcatttaatggagaagcttagtattttcccacacttccttcatagagaaatttttgtatgaaggaagattaaaattcacctgtgatctctgtatttgattgtgacttataaatttctgtggctccctgtgccagagaatgaaagttgctcaagtaataatttattacaataccagtttaatttgagactaaatagaataccatttggaaagtaatcttttgcaaagtatatccccaaatgtaaaagaagtttggatcaataccttttttcaggtaacctagttgtctatactaaactcataaagactacctttctacctgcctaaaataggggctttttaacctaaaatatgctgctggtgttctaaagaatcttgtaaatttctctaaattgttttcttttctaccaagtgaaaacttgaaaatacagtggagtttttcttttagcattggctcgatttaaatggaaacgagttattataaatggtgtattttagccctccatagtgaaataattattttaacataattaaaatgcaagcacagatgaaagcatgaaggtctgcgtgacaggcagcagcagcggcactttgcctgcatccctgggtttttctgccctaaaggatttttaggtttttgatattgcattattcctgaagtttttgtttatcagattaaattgtaactttggatacaataaaattaacatttattactttctgccatgaatttaaaaaattttaggtataatttcaaaattacattttaagtgtaatttatgttacttatgaaatcatggaactgggtcagatatggatttggattttgattttgattctgttataaggagttaaatattaagtttcttgataatgtagagatacatttgagtttatatcatatggagtatggagttatataatgggaaaatacttatttattttatgattgatttcaaaactgtatccttgaattgtaggtgttagaataccagcgtttctccccttccacatcacatctgtatttctgtggaacaatggattataaataaccctgactgagagtgggtgaggagcggtggaggaggaatagagttgctggggagggaggggacagtggcacccactgggcgccctcagctgggaggcctgagcaggccagtcctactcgcgggcctctgcagctcttatctttttgtgcccaccatggcattcctggtgtgccctttgttcttttgtgcagtgctggatttttatattcataaatttggcagaatatataaacagtgacaactaagagaacttgtgtatatacacctaattcatccgtttcacatcataagatgtcatcgtttttctcctacagaatgattttaaatgtaatcagcctctaatgcagaagcaacgatatgtgcatatggacagctcaggacttcaggaaagaaacactgacttttgtaggtagaggatctcacgtagaatttttcatttttgtctctagattcttgttcagccctttcttaagcagcataataagttataagagtgttaccatctagattttttatgcttaggtaaattaatataacagaaaaactcaccaggccaagggtatggatattactttgttctctggtgtttctatctgctttgcatattttagttattctgtaagtgcagagccataaatacagtgattaaaatagttacttatgaactaaagaaaaaaaaacctcttatgtgttttagctaatttttaggataataatcaagttaccaaaacattccacatgatttttaataaacataacatttctagatttaacgttttccagaactaatttctaatttctaaattagaattctaatttctaaattaatttctagattctctttctgggtctctggaattttctaggtacctgaaattttctgggtacctggtctgtttctgggtacctggaattttccacattattatgacatttttagtggaggaacatttgaaaatgtctttaatgtcatatgttttctgtatttgaaaaaaacaaatataactggatttttaaaaatatgaaaacccattccaggtaaagaggaattttttacagctgttatctcactatcaactggtaattcagcctcccaatcgaaggttgctgcttctttgcaagttagaaatgtttcctaagactgtattaacttttctggacagtatgcaccactgaattacagttgaattgcaaatgccggcataacataaayctcagattgttgcaaagtatcagcctaaataaatattcagaagagttggaaaataagcattttgacagtaaagaaaacccctgatggataatgtagtctgtggactttataattaaacataaaatcaattacaggtttcacacataggtgcacatgactaagtgtggggatctgtggatctagttcatgttttggttttgtttgcttacgattggctttgtagacaaacaggtacctaaagtgggatttaaaggatcaataaagtgtagacgaaagaaaagcctggtctagtaaggagaggtagagaaaaacgaattaacttgctttggttttcattgctttctcttccttctgtgggtggggcagttacatctgtgatcccttggcatatttcatttcatgggctttgtgtgtgtgtgtgcacgtgcacgcatttttttttttttttgaggcagagtctcgcactgtcacctgggctggaatgcagtggcgtgatcttggctcactgcaacctccacctcccgggttcaggcaattctcctgcctcagcctcccaagtagctgggattacaagtgcccgccaccacacccagctaattttttatatttttagtagagatgaaacatcttttaaatccaataaactcaatagaatggttggcagagtatactaaaaatttaattaagataaagcaaactttatattcactctctaagatatttaagtttttgaattattttctcagtttccctttatgtatgtcacccagatgttaagtcatgatgggggaaaaaatgttttatagctaatggaaatgaattgacaggtttttgtcagtagtaaaaacctgaggaattgaccaaaaagaggaggaagagtatcagcctattgtcttaagaaaggtaccttttgatgtaaatattctttaattgaatttttattccatttaaattttaaaagaattgtgcagcagtgcagcagttacatttttaaatctaaatcctcttagatgaattagatgaagtttatcatctgtttttacttacattttaaaaaaggaattcagcataaaggtgccaaagtgttagtacagggccagaggttttcctaaaagaccagatttctcccaccacacggtatcagatctgtactgcattctcctagaggcacctctcacactggtaggagctgtgctcttcttgccttattttccttaagggttaggcatttagaagcctgaaatgaaaacagtctcttggatgagtttttcctgccttgctaaatatcccagaaatgtattctgagaaaacatttcagtgtctggtttgaacactatgctgttccatttgtatccagctcttttctcagttaagagagttatgggagtgtttacttttatctctgtaattgtctctaattacagacaggaatacttgttagaaaattcaatttgtgctaaagtagagaaatacaaagtagaaaataaaggcgtagcacacaatttcagtgcactgtcatagcaggacgagccgcagacaaaaccccttagatactaggttaaagaaggaagtggctgtattcggctgggagctttggcagacttgtgtccygaaaaccaagctccctgagagagaaatgcctgcccttttaagggcttacagctctaagggggtccatgtgaaaggattgtgatcaattgagcaagcaagggatatgtggctggggctgcatgcatcagtaatcaagacagaacagaacagaaagtttcacaatgcttccttatacaatgcctggaatctatagataatacaagcggttacgtcaggggttgatttttaactaccagaccaggcctggggtgtggcgctgggctgtctgactattgatttcatttttgcctttctttaacttttacttcctctttctttttctgaggtatgagacaataagagaggtggtctccttccttattcccccctgtgagaatctcacttattagtgggagttctcattctcattttcactacttaggtcttcctgcaagacagatggataatgattcatgtaatacatttgtgccgaggttttctgatgaactaagctagcaacaaaactttttattatttgaaggaataagggtaatacagcagcaagcaagttaagctctgccagttttattagtgattatttctaactgtatgattatttcaactgtatgatttgattgagcatgtagatgggggtttggtttttaataatggaagtttttaacagctagaagcttgaacttgtgggcgtctgttcggggaaagaattagtcagagtatagttattttgaggcattaacttttttgcttcctaaggccattggtctcctatgttagtctttccacaaacataacatggcctaggctgccggcaatgttttcggctaagggaggaggctctggtaacttttggtttatatgcttaaagaatgatttaaagacttggaaatgctgctgggccagacgggtctgggttctttgactaagtagtatgtgtacagtggggacacttatatataagtgctagcaaggacaaaagaggtccttacctgggaaaaagattgagtacagtgacagaacaatagtaaaacagtatacaagaatactactaggcctaaaatttctaactatattacttgtttgacgagtcctaaagcttcggccgtgggtagactagtcagcttctggtgtgtgactagagcagggcttgttgtttcctcagcagcgcagtctcatcttaggattagctgggttggatgatctgagtcctactggctggttcacttgtcctgagatgccggtgttagccgactgtggtggatccaagaaacracacctgcaactttagcagcagtgggagtggacaagattacagtatagggcctatcttatatggatcctagagaaattagattttactttttaaccgaaacagagtcaccagatttaaaggagtgtcaggcttataggcatttttgtgtgcttaattatgaacactttgtatggctattcctgaagcctgcatttgctttttttaaggttaattcccctagttcctggaggttacttttaatttgggggacttatgatttgcggggtggccgactgaacaaaatcttatagggcaactacctagtttgtttggtgggggtgcacctgacttggaggaggagcataggcaaaaacttgattttattttaaatgaatttcctggcaatatttcttcagtagctgcttgagtgccagtttatgtgttttacctttttctgaactttgtggctggtaggcagcatgtagttttcatgtgatctttaataactttgctgttttctgtaccaagtcagctacagacgccagcccgttatctgaggcgattcgtaagggtggtccaaakctaggaataagatctcggagaagcacatgggttactttacgagctttttcagtttgtattggataagcctccacccacccagagtaggtacacacaagaactagtaaatacttgttacctccacattttggcatttctgtgaagtccacctggagatcttcaaagggggctgttccataagctagtatgccgggcagaacggctggaccttgcctcgcattgtgctgctggcaggtaatacattgctgtgccactgttttggcaagggctgataaatgtgagatgtagaataactggcctaacaactttttaagtgactcttggcctaggtgggtgatctcatgcacagccagtacaactgtggctcctcgcagttgtggcacagctatccttttatccagtaactggatctatccttcttctattatttgtcctccttctgtctggcaaaagtccttttttttttcattagaataagtaggtacaaggtcaggtgcttgagggagaaggagggctgtgactgacgcccggtagcgggtggatgcagctttccgagcctctgagtcagcccaggagttccctaaagcaactgtagtgggagctcgctggtgttccctgcagtgcatgactgccaccttttggggcctctacgctgcttctaatagttgcaggatttcttgctgatgttttatgttttttcctctggagtttaacaagcctttttccttgtataatgccccatgtacttggagggttaagaaggcatactgagagtcagtgtagaygttcacagtcttacctacacttagttctaaagcctgaattaaagcaatgagttcatccttctgggctgaagtaccctggggcaatgattgggcttcaatgacagtatccagggttaccactcaatatcctgcatatttttctccttgtgggttgatgaagctgctcccatccacatacagctcccagtccactgatgcctaaggctggtcccagaggtcaggtctgctagagtaaactgagtctagcacctctacacagttatgctcgacagggctttctgatactgagagcaaggtgttggggttcagggtgttacaaacttcaatggttatgtggggattttcacagagcaagcctttgtacttggttagtctagcattcgttagccaatgatgtcctttggtattcattaaagtcaccacagcattggggggcttttatgttcaggttttgcccaagagtcagtttatctgctttttgttctagcagggcagttgctgttaaggccctcaaacatggggggcaacytttagaarccccgtctagttgtttagagaggtaggccaccagcctcggccagggtcccacagtctgggtcaaaacctcaactgccattttttctctctctgatgcatatagtgtaaatggctttgtcaggtcaggcagacccagggctggggctgacatgagtttttctttcaactcacagaaggcttgctgctgttgagacccctattcaaaaggttcgtggtcgcctccctttgtgacttggtacagaggtttggccagtactgccaagtttgggatccataacctgcagaaccccacagctcctaagaattttctcacctgctgtctggtcttaggctccggtaggttgcaaatgacctgctttctttctgatcctaggctgcgctccccctgtcggatagtaaatcctaggtagtgtacctgctgtctgcagatctgagctttctttttggacaccttatacccacagtcctccaggtgccggagcaggccatctgttcctttgacgcacccagttgctgtggggtgtcccagcaggaggtcgtcgacacactggagcaacacacagcctgggtctctggcgggaaacttttgcaggtcttgagccagggcctccctgaagatagtgggggagttcttgaacctttggggaagccaggtccaagtgtactgagtggtgacacctgaccccggatcttcccactggaaagcagacaatttctggctctcaggagctagtctgatgctaaagaaagcgtccttcaagtccaggcgggtgaaccagctgtcctcagtacatgagcagctggcggcagtcagcctaagtagggttatgagtctggataatagtttagagcaaattaattaaggcttgaggctttttagtataagctggggtattctttcagttgaggagatcagcagaggtgaagggttgatacacaaaggcacacctttctaccatatgcccgtccttgtctaccccagtatatcactgctccgtcaggggcatttgcatagctcgagcacggccagatttgagactgcctgcttgactatcttgacttccttccctggcctctcgcggctctgatcctcccctttgaggtgagacctggagcatgttagctcctgaacctggttcctggggggctgctggcctctgtaaagcgggggtaggctgggacatatggagggagaatttctgttacctctggcggctcctgcaaaactggtttctcttgttgtttctgggatttcttcttttaattctgtctgctggcgaagctgctcttactgttacttttttttttctttttttttttttgcaataagctgttaaacagggctggatctatgctggttttgtctatattatgtttaactatgagtcactctaaaggaatttggtctgggtacactggctctgacccctgtcaccacctgaaatacatggccaattgttccctgtctgtagttatttctgttggccatccaacaccaaaagagggcaattctaatttacattcacagagagttctcacctgtgaggggttagcttaactctgtaatcccctgcacaaccttttttaaggttctgtaacgtgcactttaatagagtaaattttggatgttttgatgacttttttcttatttttttgtatatgtatattttttaacatagttcctagcagggtgggcttactttctgtctaacttattttttatttttattttttgagacaaaacaacactcacactacaagaaggaaagggtaaaaggtcactcacttgtctaattcacactaaatcaaaattaaaaccaaagcaagtgtcgataaaggcacgcctgttcatcaagcaattcaagccaagtcaaaatcaaaaccaaaaccaaagtgccaataaaggcacactgtgggtgatcaggccacgcttccactcagatggagtgggcaagttcctaagaccagtcttaccatattccagatgtccaactccaagcgtcagttccttcgcagtgttcagccactgcattgatcctccgtgggggactgccatgcaccgctctgatgaggtgttccaccaggacaaatgcctaccccggagcgctctcaggatctgcgtcgctcaagctggctggagtcccccccagggatgctccagagggcaggcctaagccacctaaggggctacctctaccatctgttaattacctcgcttcccggtcagggaaccaagaaatgtagcaggacgagctgcagacaaaacccctctgacaccaggttaaagaaggaagtggctttatttggccaggagcttcagcagacttgcgtcccaaaaccgagctccccgagagagaaatgcctgcccttttaagggcttacagctctaagggggtccatgtgaaagggtcatgatcaattgagcaagcatggggtacgtggctggggctgcatgtatcagcaatcaagacagaacagaacagaacagaaagcttcacaatgcttccttatacaatgcctggaatctatagataatacagtggttaggtcaggggttgatttttaactaccagaccaggcctggggtgtggcgctgggctgtctgactattgatctcatttttgcctttctttagcttttacttcctctttctttttctgaggtatgagacaataagagaggtggtctccttccttatcgtgagagctgtgacagaagtgtatgtaggtgtcacaggagcttgggaacaggcgggatcaggcagtgctagaggtgttaagggttaaggagtgagttggtggagatgtggctggggtaccaggaggacttcaggcaaaggcaccctgtgagcctgctgcgtgtcgggagtcacagcagtgttgtcagaagtggaactgggattctagcartagcggaactaacaccagaaggcatcctttgaagtcgcgtggaggcttaataagattacagtcacctgaatgttaattttacttctttttggatttttattttaataagtaaggggtttatctttctcatgtcatgtggactgtggatgtcggtgagtccagagcctaacaaaatcatgaaagagccagagcccttcatcctactgctccccttcccacagtatggtgctttcgtcctcctggttgaggtggaaaagggaagagtggaaagaaaaaatgttctcatgagtctttgtttttgagttttttaattggaaagaattttaactactgaaaagctgctttcatctgtagtcaccagctttgacattatgctgcatttgtatgtgttctctttctctctctttctgagctgcttgagaataagtggcagacattatgaccctgcagccctgaatacgtgggcacagatctcctcagaggtaggatgttctcttacgtaactgaggtccattgatgcaatatatagtgcgtactcagactcatggttttggtaaaattgattcttaaatgataatctaaaaaaactttgcaatattttaataaattcaagaagctataccttaagaaataatgtaaatgatctattatagaaacaagttagccactagaagatccatcagaacaaaacaggaatgtaattgatactgctagtgagaatatcttagttgaacgaagtctagacatgtttttcttgttcttctccaagaatagtttgtttacaagaaacaaatacctaccgaagttagcttaaatataaggagacatgtgacaaggatatcaggtggctcacagaatctaagttaagtgaagtcacacagtccactgaaactggagaccagaaagctggtgggaagtgagccaggcagtagtgttttccacctcccattcttgcgtggtttctacattcatagccaggctgttcacttcttctctgtagactgcttttcctgcccaagaccctgtcatgattgctctagaggcataggctgagctgtgtcatcatgatgttctagctcagctttccgcatcagctgacatggtttgggtatgcccttccaaattcctgggtgcaggaagctcccttgcttcctgcctggcctgttcattggccagttgtctctcctttacctgctgagtgaagccagagtgggaggatgacctgggctagtacagtacctgaggcccattcctcagaggactttgaaggacttccacagagctgcggctggactttctgccctgtctgcggggcagttctcctggtagccttggacagacccaattctgtctcctttctcacttgtagtttacaagaataactgtggatatgccgggaatgtaatatccccagatagggaaggacagcctggaatagcctgggctccattccacactsccttcctccccacagcagggtgagcttcagcacattagcccagcacatcatgtggcccccagggtgtaaaactcagggtgggctacttcctggggtccttcagctgccttggaagtgaggcatgcacagatgagacttcatctgccctgggctgctttcttgcacgttgggggactggcttgccatggatcccaggcctctgttgtcccttgcttcctatctgtaagtaataaatctgcttcatatagcctcttgggtgtgggtgttctgtttctccaaattcagccaagttggtaaccagtgcacagtgaacctgtttcatattttcttcttcctctcttccaaaatatcaacttcacttttttctggtctggtcatcctaattttaaagacaaaaagtataacttaaaaaaaaacaacaaaaactgggctggccaaaaaaaacatgtggtgctagtctcttatgtttgttgtggggaggtttgaggagggcagctgctctggcccaaaggttttcagcctctgccctcgaatctccagctgtcggtcatcagccaagagcggaactggaacaacaagactaattgtattaattattaatttgttcattaaaggtttattgagcatttgttttgtgtccagtcctgttctaggctatggtgatgtacgtttctgccctcatggagctagaatctgttagtgggaggaccaacaagtacagaaaatgacagcacagtgtgttgcatgcttagataggaccgagctctgcatccgttggggaaagatgagtgaagtgtttatcttggttgtggtgaaatcaggactgtcttcctggaggcaggcggcctgtgctgaggccttaagcaggagctgacccatgtgatgaggaggaggaaggcagggctttgtgctttgctggccttctgttagctcacatttgttgcccacctcaaggtagcacctaacaaatgccgtcgagtggatggcgttgccagaagggacaaagcaggggatctgcatggaattctgttgcctagaggagcacagcccagtgaaattgtaatgcgagcaacacaggagaaatgtaaaaatttcaagtagccatattttgaaaagttaaaaaaagtggagttaattttaataatattttatttcacccaatatttctacattatttcaacgagtaatcagtgtaaaattttctaatgagatattttccatttttttcacactgagtctgaaaaatctggcaagtgtttcacactcagcacagctgagtctgcatgtgcccccttcctggggctcagtagccacccatgccgagtggctcttggcccctgtaaggctgaggatggaggctgaaggggtgagttgggagagatgtggctgctgaggtrggggaaccttccttgtcacattaaggagtgaggacattttcccggaataatggaagcaattagaggactgaacaggcggctaccgtgagaaggcttgtgtttgacgtcaccctgcctgctgcgtggcaagttcaaaggcaaggaaaccaggtgggaactcttagatcactctagagatgaggcagttgttccctaggtaataatggtgatagcaaggacagaggaaagaagaccagtttttttagttattaaaaatatggaagtgacaggacttaatgattgcatggagctggtggcgaatgagtcacatcaagattggcagtctggcttccgaactgcagctggatgtgttccattgactcacacaggaatgtagatggaggaacaggattggggtggcactgaggagttcattttttagacacattgaattttatgtttctgcgttctagccaaggagaaattcaaaagctggaaatataggtttggagttcaggagtaagatgtaagctagagcgacatatttaaagtaatcagtggagtgagagtggaagtcgtggaaggggatgagattacctgaaaaaatgtgtgtagaacaggagctcttcactggggaggttttggattaactccctgcaattgtatgcagtaggagaagagcgcatgctttccacaggagtctcaaagagctgtgtgatccaagaaaggctgagaaccacctgctgccatggactctgacaaaacatggaatgggctgacagaagaggagtagattttacccagggagggtggggtggtagcagttaagaccttaactgcttaactctagggagaactggctggaaaattaggtgaaaaccaggaacatgtgctgttagggaaggaaaggaaaacaagtatatttcaggaaggatggagtagtggtgagcagtgtaaaataagccgagaggatgaggaaggaaggactgaaaagtatgcagtgggtgcagcagcgagaaggccattggccacctgggccaggtaattgatggaggcaaggccctgaagagccaggatgggatggttacttagggaaagtaaccaggtgggactgtctaccattaaaagcgtggaaaactttcctgccgatactccttctactagtgagactaaaacatctgtccagactagctcagatcaactaacttagcaaatacatgtttattgaaaggaattgctaattcagaggtggggtgaggtgtccaattcatgccgaataagtgttttcctcataactaaagatttgacttgttatggtccaaacttgtgatttgggagtggaagtggggctagatagtggggacgaagcagagccattctttaaacatggtcagagtattccctggtctttctccatgatcttgtgtgccacagatagcaggagggagcggagggagacagtcctatttcagatgatggagggaagagaattagcattattgaggcactaacaagggatgttatcttttgaatctttacacatctctacagtagatgggtagatgttctcctgtttagagatacttctcttttttatgccttagggtttcaaatatacagaactaacttggcggtgatagaatgcatttgttgtttgaatctctgttcttcaaataatgttctgaagttcctctgggtagcagggtagaatagtatctattcagaacttgatagtcatgatttactttaatcttgttgaaaccttgttgaaatctctgtcaaaatcaaaaattttaagtaccttagatttaaaatattatatacttaaaaaaattgttactgtataagaatagtcttttcataatgtggcagctaaggaccagttagtttcctgaaataaatttttaatttgaagctttaagggaaaaaagcttccaatttggaaaaaattgttagaaattattttgccattatgtcatgttaaatgagagcaaatataaagtatgggtatataatcaaggttgattattaaatataaaagtagatgttaagggatgtctatacagcagtttactgttgttgaaagtgttcttatttgtggcatagcactagaaagagtaacaactttttcaaagaataggcaacttgtattatgtggcttgtattaatgtttttaatggaataatctttggatggttttgagtataagttgtggtctaaaatgtttaaaacagagttttgatttattttacattttgctaattaaaaattttgcctagttttttcccactaaatgatttcttgtcaacggtcagcgcccttcagaccaaattgttcatatattatgcttttaggaacatcattaacatgcagtttgaaacttagagctctttataaaggagaacatacaagcaagtcatcatactctggcatttttctcccagctgtttttgtctgtctccctctcctttcttccttctctttgtttaaattgtgctaatctcccagttggggtagatgatagtattatgtggtcctaatgtattttaaccttgctgactgtctttttgggcactcaagattttctctgtcatatgttgttaaactttattttgttggttctggcctgatatcacaatctgcctttccactcatctttgtgtaagggaattagatggggcatcctagatgacagattagctgtcaggtggaaattgagtcaagactgctgcgtgcttagacaaaccacagacaaaccactgagcaaagtgtctttgtttattttctgatgcttgtaatagaatacctgaaactgggtaatgtctaaagaaatggaatttatttcttacagttatggagtttgagaagtcaaggttgaggggctgcatctgttgagggccttcttgttggtgaggactctgtagagtcccacggtggcacaggcgtcacatggccagggggctgagtgcccgctcatgctagctcaggtctctcttcctcttctaataaagccacagtcccactctcatgataactcgttaatctattaattcatgaatggattaatccgatcatgagggcagagctctcatgacccagtcacctctttaaggcccctcctctcaatactcccacattggggattaaatttcaacatgaggtttgaaggggacagatactcaaaccatagcagaaagtttcagaattccaatatttgggaaaaaatattagttctattgtcatatgtctagatttatttaagtttgtaggtaagctgttacctaaatatattttaaatccaggttgactgatctagtcacatatacactggctttaatgcaagtatatctagtataggtgctgttatttttttttttttcttgcagacaaggttatgtctcaaggatagttatttttgttcaagagaacagtaatcggaaggataggttcatctaatgatgtaacagaaaccccaaataccatgacttaaatgagagagagatttgtttttatcttacatccaggggtgggctgggcagaccagaactagacatgcgcagagatccaggcttcttcagctcagcgcactgccgtccctggggcgtggcctcgtcctcttggctgtcggggtggggcgggnnnnnnnnnnnnnnnnnnnnggaggaagggaggggtgttcccaggccgtggggaggctcctggaagttgcctctcaacacttccatcttatatcgtatggcccttactcagtcttctggccatatgtagctgcaaaggaactgggaaatgaaatctttcctctgataggctatgtggcatactaagatgaaagggttctgttattgaggaagaaggagagaaaaaggatattagggaacattagcaatctcttccccaggagttataaatctatactcatctgtactacattataaataattgctttgattttaattcttaggttttggggggccatatgacctaccccactggcagataattcagaatgctgtggttgtgcttgggtttccggaccttttaatgcccttcttcctttcagagtttgagaaaagtcttgtaatcccttgtttgtaggtttttgaaagttaatatttgataattcggatggcataggcattgcccaggatttttgttttaatgtttgaaatgtttaagaaaatgaaacaactgaagtagttatactacttttgttagcttacttagaaaatagtaaattgtagattgcatttaaatgaaatttaatttaatttaaaaactggtttttgacagagggggttggtgatagtaggtccattcatcacctacttgtaaagtttatattggatttacaaatttaaacaagtctaacttttctgtttactgttttgagtaaagctagagctagatggttcatcccacggtgaggcagcaagcacatactgcgttgtgaccccatgggaaggactcaacggccacgtgaccacgtggagagcaggcttaggcctaggagggttctgggcagagaggagatggggactgtgaacagaaggaggaagtgtgggggagagctgtgcatgcaaacacatccaggtagggagatcctcacccagcaggggaattaccagacagctggagtctgttatgaagccaaaataaagttggagacatgcatagtggccacatcacgataaaccatctttgccttgatgttctgaattctttcctgaaggctgtggaaaaccaccgaggggtaaaataacagtgtcattttagcaaggccattttagagacagtggttgtggggagggtactggattttggattgtaaaagactagagggaaaagaccagtaaggaggctgcagatccaatccagccatggtgagaggtgggatcaggggtgaggagggtgggagagattcagtatatggaggagagaggatctgtgagacttgtataccagttggatgtggaggagaaatcagagggaggaggccaacaacttcccaggtttatccttgacattcttagttaccaaacaaaatcacacacacaaattaaaaacctctgtcaccttctatgtagtgtgccaaagttgtataatctgctttattcttttaagtagctctgagactcatttcaggtgattataattcatattgaagaaacatctggcccacgtgttgtggtttgttttagtttttgcatgtcttgtgggaaaatggattctctaaagaataattttgtaggctaggagattcttcaagtataattataaagctgatttaattcactttctactacatatcattaaaacattgaactagtcttctaaaatattgtttcttcactgtggatttagttgagctttcttatgttatacgcagattctaatgaaaaataactttaaattttgtttgagcaattccgcagttagattatggagtagttggtaggtttaactgctgaagactttgtctctactgctgttgcagcacattttcctttaggagaaagatgcatccttttccaggtctaactctcctgtaggactcttcaactaccgtttattcaacaatcatcgatttcttagtttataccaggaactgatctgaaaagtggaaggtgatataaatgggacaccatctccactgtcatacgctctcagtctttctaaatataattcaagaaaaagaggtctgcaataagtcttaaatgtggactttgcttacgtgctatctttgtaataaatagaaaataaacgttcttattagaagtcctcataactgcacaggcatttctcccacactgcacgttgcataactggatctgtatgtagtgcagttggctagggtcatgccctgtgttgtgcaggctgcttttgattataaccacttgctgatcaggaaccagcatttaaaaggtaaaggagtgtttgctgccaactccaatgctttgagtggctcagtgcgttgcctgcccatcataaccacacgttggaaaagccatgaagcacagaagatgctgccgatctgtgacagggctggtagtagcaggggaagaggacaactcttgagcatagccagagataaagaaacgcacactttgtttagtggcatttagattttacagcttgttaaaaaggaaaagatttgattagtggaattcctgtaggaaaaaataactttgttattgcaaattttacataaattgcttttagaatacactctttaacgcaatttcttttaaaatgtacatttttgtttcttaggactacaactcctataaatagactcgaatagacttttagaatcactgatctctttttcctttttaatttcatggatcacctctttagggagactgctaatctattagtctttgaattcagatgctgttagaaggtgaagtgtctagtgattatgaaaatatgtttgagaaaataaattgaggatttgcactgtgatgttcttaatcttttttattctcccagctgtacaataatatgtctccacccagtgagaggtagaataatgtaccatgaggtagtactattagtcgttaaaactatgaattttgaaattagacttggtaccagtacactccccactaatctagttgtcctaaccttacaacatgtcagttatcattgctaaactcgagttacgtatctataaattgggctcatctgtacctttatgggtattcttgtgaagagtacataagaaaatgtatgtcaagcagctagtgcagtgcttagtaactagcaggcactaaaaaatggtacatattgtgatgttaaatactgtttttcctaggctgacataaaaatactgtagaaagagttggactatatagtacttactcttggaatttaaatgtttttgtaaattagatacagatgagagagggcactgtggtttttatatggttcagctgttatgtaggaaaaacaaaatttgttttttttcagttcataaaaacaaagtttgctttgagttcaaaatcatgataaaagccagaggaatcgctaaatttataactaaactatagtgagttagcattaaagaaagcagagctatgtaaaattattgatgatttatttttcccctttaccaaatataaatctgtattataaacaactataaagtttatattttctaagataaattgtgtttatatatttagaaaagaatagtttgttaatgatttacattataccagcttgttttccacaacaggataggtaaagattaagaaacgtaattatgactcagttgtagttttaatgatcgttatgacaaacccacagaagtaggctatagaattccaagaacattatgattttagttatgaaaaatttgcacactaaaggaagactagagaaaacagtacaaaaatgctgctaacagtgggttttctacttggctttgtggacaggcaaggccaaaaaaggaaaataaaagagacttagtagttttcattgattaatatatttgtcagtagaaaatcacttttttcctatcactaagttacacagctgaagttaccatgtgtcaagttatataggtaaagttagcatgttgaaacactattatagtcagtgtcttcaattatagttttaaagaaacatttgtaatgtttgagtctttaagcaactaaatacactgtgaaggtaaggcatttgattagaatgggtaatggtcttcctgttgtttgaagagttactatagctaagtaagtgcttcctggtgccctagctcctagcagaatagaagctagatagtcagtcaccttcagaatgcccctgtcaagcctcaggcaccttgtgccttgtgggaagtggaagtcagtttttcagtgtttcttcatcagatgtaaactcttttgcagcagtatgatctcttttgtgagccgtttatgtacttgggtttttaaaaaggggagtaggttttcagactgcccttttttcagtttcagagatgttgagatcccaggagatttcaggtgtggatgaagttaaagagaagaaaaatattgcacctcacaaattttgcatcttaggtggcagaagcaaagatttaatgtcacattcctatagattgcttgtataagtcaggcaccttttgactgaattataagttgaaattttattgtattgatcttcatgtattgaggatgactcaatacccagattaattcacaaaagatctccttgcatcctttgttctagatatattattatcccctgaggtaaaatctatactagtttttgcttttgcctgacagtagtgtaattttaacctgaagaaatttttcacacccacttgttgttttctaatttatgaaaaaggaagtgtctgccttctgcacctttctgagctcttactggaagccaggcagctctggaatagaataggaccagagccctgagtaggcgctttgctcacttagctcttgggcaagttaatgaagttttctgaggccctgtttcctcttttgtaaaagggagaagatattaataatacccagctcacagggtgctctaaaatgagaggggagaatgtgtgggcatacctgtgataaagcttccatggtggctcggaacgcggtccagatggcaacagccatcctgtgttcccagcttcaggccctcgatggcaggaccccctgtgcctggcacagaggattcagaggcaggcttgtgtcccccagtcttgggaatgttttcattgactacataatgtcattcgacattcaggggagcaagctatagtattttataagctggccaggtgcagtgatcctagcactttgggaggccaaggcaggcagatcacgaggtcaggagttcgagaccagcctggccaacatggcagaaccccatctctactgaaaatacaaaaattagccgagcgtggtggtgcgtgcctgtaatcccagctactcggggggccaaggcaggagaatcacttgaatctgggaggtggagattgcagtgagctgagatcacaccattgcactccagcctgggcaataaagtgagactcagtctctaaaaaaataaaaatagaataaaatacataaaagccaagttcgaaggagtggattttccccaaagttcgtataggttaggtgtttttaatacccttttcagtggagccacagttcagttcctcctggtatgttagaaagccatctaacaccccacatgccataacaaacaacaatttcaagaaagcttgaggaggaaattgtattcttctttccatgaatcctgtctgggctcttctcttgctgggcttttggcattttgacctacaatactcaaaccaggctcacaaagttccacctggggsccctgatgtgcaggttcttagttggaccctttttcatctatatgagtccttgttcttcccccaaatccaaattacatgaactgtcaactaggcagaagaaaggaggtgctgatttttctatgtgtcacgtacttaggtcaggaagaagtagatgcctccgggctaccttgtatgtacgaataaacgagagtgagcctggccgggtatggtggctcacgcctgtaaccccagcactttaggggctgaggcaggcatatcactaaagcccaggagttagcgtccagcctggacaacatgacgaaaccctgtctgtacaaaatatacaaaaattagccaggcatggtggtgagcacctgtagttccagcttctcaagaggctggggtgggaggatggcttgaacccagggaggtcaaggctgcagtgagctgtgactgcaccactgcactccagcctgggcaatggagcaaaaccctgtctcaaaaaaaaaaaaaaaaaaaaaattgtgtaggagaggatgttacctgtaatttatatctttgaccaggaagaaaaaaatgaatggaagatggtagggtggaagctgtggctgcatgtgtctttacgttctctgctggaacagcgcacctgtgctaggttttactgtcctactttggccccacttcaagagtgtttcttttgtgaagaaatcaattatcttcaccacttgttgtctgctaagtattagtgaagtctgatatggggaatgaactaccctcaggcctctggaagggawggagcaggtgggagcctgtctgtgaccagacgcacaggaccctttgtgataacttaccagttccctgcctgagctcctggaggctttcccatacattcttattagtcatttttggaaacttacatttagaagttggtccttgacattggtgctttagggagagaaccacgtcttactgtcattggagagtggcacagtgtctttgagtacacttttaaaatgttttctaaggctccacactaaagagtctaaaattgaaatatttgaagacctccttaaaatgaagcatatctaacttcaggcttgatttctcacatatatgtaggaaaaatatatttataagttctggaaatttgccataaatattattacctccaccaccaagaaaacaaatctgtgtgaccacaaatgctcccaagttgcaggcattcccagaggagcagcattgatagtgactgtaaactcttgtttttcctgtctaacaaagatgataggatggcttccctttcagcctttgcgtgaacttaacttctggttggaaataagatcccattgtctaaattatgtcagcgtagttcctggtagcacaagaatattaaacactttaatgtgacatccaaaattaatgagtcagttataagaactttccttgaaggatggaaaagatcataacccattttcatgtcctgggatgcttcattcagtctcatggtattaaaaaatgaacagcctttggattggggggagtggtgcgtgacacttcacatgctctgggccaccagttcctcctccctgctgctccgccactgcgtgacatttccttcttgtcctcattcccagtgcttctgtcttttctgtcttaaaatctttgctgctttggcctaggcggcagtagcagggggagagcagctcaggtgaaatgcttgccctcttctggaccactgtggagagaggcggagtcatatttacctgtgtacatcggtggcccccaaaggtggtttcttggcgatgctcacacagttgataggcgataggcaagagacgatggtattgacagtgtacctgatgcttgcagcccagccagggcctccatacccagtgcctcctagagcccccatgggaatacccaggaggtcatggagctggaacgtaaacccacgtctctattccaaaactcatgcttttttataagaggaaaacttttaaatagttttttcttaaaaagcctctttttcttcttcctaattggttctaaaacaaaagtttcggcaagtgcctcaaaggaaaatagggacaagattgttttctgtcctggaattcacagtggtgtctgtatgtactttagagctaaatatgcacatactgtgggcacatgcttattttctgaatgagagtgctctaaaaggattggggaccactgctctgagccccattgccccatctgtggagtgagtgctgctactcagctcctgggattgttctgtggttctgggctgaccgtctctgtgtgggctttagactgtgctggtgcagagtgagtgccccagaccagtagctcctgatggtgtggggactcccaatgctacttttggtgatttattttcacgtactcttgtgtcatcccagggtgaagatacacatattctctaatagcaggacatttgtttttcatttatgaggtcattcagaatcgtaattgaggtgatgttgaacttcttagattgcagaaatggcagtagcagtaaacaagacctttatctgaacaggaaastagtctttccccaggaagtaattacatttccttgtaatcacctgtttgtgtaatcgtaataactttacaagttattcataaaaataggagaatgactagtttgtctttgtcataacttgtttgtgtatgatacatgaagtagaattcatacagcacaagtactttkgaaatttggaaaagtttaattttctaggactttttagttatttttggatgttaaagtaagtatatatgacagtgcataatgtgtttcaattttggaagtgattctttgctattgaaattctcattctccttacttcattcttttttttcagggaataccttggcaagcagctccagtccgagcagccccagaccgctgccgcccgaagctaagcctgcctctggccttcccctccgcctcaatgcagaaccagtagtgggagcactgtgtttagagttaagagtgaacactgtttgattttacttggaatttcctctgttatatagcttttcccaatgctaatttccaaacaacaacaacaaaataacatgtttgcctgttaagttgtataaaagtaggtgattctgtatttaaagaaaatattactgttacatatactgcttgcaatttctgtatttattgttctctggaaataaatatagttattaaaggattctcactccaaacatggcctctctctttacttggactttgaacaaaagtcaactgttgtctcttttcaaaccaaattgggagaattgttgcaaagtagtgaatggcaaataaatgttttaaaatctatcgctctatcaatctatgtctctatgcagctctctgttcatctatatatcatctgtgtatctacacacacagacactattagtagtagcacagctgtaaaatcttagtttttaacatgatactgtggttcaaaagatttgcttttggagttcagtgagaagttttagcattagatttattttcagtacttttatccttggtttttagtgccttaagtttgttttgtcttaatacattttggtttaagcattgccaatatatattttattctctcccctttcgtttctagaaccacatccctttagcagtacatacatggcatgcaggcctcctctgaggcttttgtttttgaaccacgtcagctaatctctctgagtctcatttttcattcattttcatgttttttcactttttattcctagcagttctatgaatgttgagtagatgtgctaaagctaataaaacatttattctagtaagttttttctcctatagaaagccactcgtagaatccatctcctgtttaagaatcgaagattgtttcattttcaacatagaaatcctatggaagaaattagttaaaatgatgcataaattagtcaatgggttcatatgacttgaatgattttccttaaaggggttcatgtttgccagaatagaggtagtgtgatcaaaccaattttttcttttactaaaagtttaaaaattgcttatgtgtagtttacttttagaaacatggaaaatcattaaatagaacgtttctcatagtaattacagatactacattagcagaagatcaggtttcatgttaatatattaatggtctgtaaaatttttaggattttaaggcactcaatttctagaagtcctagtaaccagagacacggccatcttctgaatttcgtaagaatacatggattgtttggtgtcatagtttctgattttagtttcattttgcacagccctatagttctaaagtagaaatcagtgacaattgttcttgcagaaagtattagtgctttagttcctaagaagtgcttttgtacatgggaagcaacactcccatgtaatcatgctttaattttttttttttttttaccttacagcttgcatatttattgaacaaatactactaaaatagctaaaatacattgggtacttgtcatgagtgcatcggtaaagatcacactgttacaaaagcctgcattttcagcagtatacagctgcaactctacataaatgccacagatgcagaatactgttttcttgctctatttacacagctgatatacctattctaacaaaggagggagaggagtaatgcacaagaaactcaggccaatgggggagcaagaagaaaacaaagaagtgcagtgcatgcgtcatcggtgtttaacagtcagaagcgaaacagttcagaacaaggcctgccctgtcaaaagaagagctaaaagacagttatataaaaattaaggtgggctttcagactggctaacacaacaacattccatgagtagatggtaatttatttttgtttatccatttcgttgggagcaaggacaaagatgtaaatctacaccttgcttatcaaaattgccaaaaaagaatgctctgccttttaaaaaagtaccatgattttgtagacattgttttccaatttaatatttggaaaaggtgtcattttcatattcctactcagatgccagtgttttgggtttttttcagggggaatttatttaaaaaggttttgctctttttttccacaaataccgtttcaaacagaaagaacccaaagagacacctcaaaatgcctgtaaaattattgcttttctttctctaagtcaggcaggcgaggcaacggaaaggaagagatttggtaagtaaattacagttttgtgattgctcccactaccgtgactgcatgtctgtgggtgccagccgacgagacaatcgtctctcacactctggtagcattcactcaacctacaacactgaggaagaaagccacactgaagacacaaggaaaacaagtcaatccagtctagagaacaacattcagggaaacagagtaccaacaccttcttagaacatggaaataaaaaataactccatcagagctacctcgccaaggagcatgttgaaagtccaaaatagcaccattcatcagtgtctcaggtcctgtggcagcatctcggtcagttaccacaaggaaacaatgagtttcaaactacttctatacatcaaaagagtacatggataaaatatagagatatacagacaattgcataaactactaggtttgttacattctaaatgaaaaaaaaaggggggactcaggagtggaccagttgtgtgagcacggtgggagtttgagttgtggaagacgttgtagcgaaccaggcctgaaggcccacctgtaagggttgtaaacgtggattcacggtgtgaaattctgagcattttcacttgagtcagaatgattaaaaactggtttgatgatacctatttgtccactgtaaattctctaaagcaaggctcagagtcacatagtttcttcttatacttaatgatttacacagaaaaaaatcccatatataataccatgacctcatcaatacccatacaccatatgtaatacaaatggaggtgttacgattaaaaaaagtagaggtaactgattcttggggagcggagttcactgctgcccattggagtcagggaggcagcgtttgtctcattgttcttcttgcggttcactttctttgggacaggaagtcttcccttaggaaaccttccctccatgtccttgtttggaaatggttcttgactgacccaaagagttctgggtagtaaaccattttgagaagcttagtcttgggcttctattctccctgttttcagtccagagagaccaacagacaaaagccccgctccctgttcactccctctcctctctacactcggcaggaatcggcgagcggccaacaggcgcgcgcgccccgacaccccgcacccgcgcccgggcgccccgctcgccgcgccgccccaactgcaccgcgcggcgccccggggagacaaagcggacctgctgctctgcgccccggccaatcatgctttaattattatctcgtatattaaaattaattccctcgaggtacgttttttccaccttaaacctttacacccaacttacagagcatacaacagtcatgaaaggagtcactttcatttttcctttgcttatcaatgtttttgattaacattcaatgcttaaaccctccttaaactataataccacctacatgttcaattaaactgcagacacctaatggagcagacttataatatgacaaaccaaatcttagaaattgcttatgagtcaaatgcaggtaactcgacctagggatacaggtagtaaaaatactgttaagcatttttaagcatctttaaatcagcctaaacaaagagcccagttattacaaaatgtgttattacacctgtgtaaacacaatttacacaatgtgatcagtataggattgttgagtttcattttctctatacttattttgacattttccttggtttcataagtcctcatctaagcaagaccaggaccgggcatttcaggccagccacggttaatggagtaaaactgctatggatcacagaactgaggtgacactttgtggtgaccgtgtgaggctttcacaggggctaaacaacaaaccttgagactggcagtcttaggacctgggtgtgacaatccagatgctggtggggtacatttctttttgtggtcagtctccacctgcgcccgctttatttttttattttttattttttttgtcagttgagttaaaagtccatgctcttcgactgggtttgaatccgtcacctacgtgtctcttttttgcaagccggtatatgagggagctttctaagttgttggatattgctcatctcagtgacatataaaaccctgagttaagtattgtatgccttctccaataggaggcaatttcttccctttctgtcttaaaatcctattgtgtctcattgaccctctgttctcaatttgtcaggaataatgtcactaaaaatacactgggaaaaaaaacaatgtagagttgaggtattgttttattggcttttttttgttgacggcataataggttatacaaagtttaccagtaaccaaactaaataaaccaattgctaaaatatccagtctcagcaggtatacatagtaccttttaaaaagaaaacttttgatttttagattttgagaagcatacagacattctcataaaagggagaatgaaattatatcttgctttcttagaaaactcttattttgggtcttgttgactctaatttttaaaaagatgcatgttttaaaaagatgcacctcccgttggcaggtgaagctcattcccacacatcgttcctagccaggcacaaatagtaaatttacagaatgtctccagttaaaatttttttctactttctatttagccgcatcagagtaattggtgttaattttcatataattaaaatttaaataatttctaacctctagctcttaaatcttggaaagcacagatccaaattttgatgcatttgatttatctgaaaattaaaagttctctgttctcattctttgcctttgaaaatgagaatattttagactaaattttgaaaccactcaaagttggtagatggcaaagttacttcccaaatacgaaccttgtgatgaaatctctttttggtttgaaatttctctcttgttttgctgtacaaaatgttctgttctggttaagagatgtgcctttaactttgtgaacaaatttccaatgaaaaagtcagttggaaagaagaaggagctgtaaataattttaaattcctttagcattgtatgcacatctgacacgagttcccttctcttttagttcttagagtgttgattactcttccaaaaataggataaaagtggaagaaacacttccgtgattgaaggaatactagtctgagatgcttttatctttcagtactatgtagacctgtgtctttttccctttacaaaggaggaaaaaatatatccaggaagtcggttgaaagaaccaatctacaaagaacaccaaataataatgtttgtaacatgtagaaataaaatatttgaaacaatagcacaaaggttgcatggtgaggcaacgaacttctgctcttgttaagacagcagattacattagataggaagtgatataacaggaatatgaagtagactgtgataaggatatgtatttaattccctagagcaaccactgaaatgataaacaaactgaaattgcaaggtatagctagctaaagagccactgatggagataaaattgaatacaaagaatacttgattaacccaaaagagtgcaggagaagaacatgggagagagaagacacacagaaaatgagtagcaaggaggctgggcatggtggcttacgcctgtaatcccagcactgtgggaggctgagatgggtggatcacctgaggtcaggagttcgagaccagcctggccaatgtggtgaaaccctgtctctactaaaaatacaaaaattagccgagcgaggtggcatgtgcctgtaattccagctacttgggaggctaaggcatgagaatcgcttgaacccaggaggcggaggttgcagtgagccaagatcgcgccactgcactccagcctgggcaacagaacaagactcagtctcaaaaaaaaaaaaaaaaagaaaagaaaagacaaaaaataagtagcaacaaagtagactttaagcccaccaataacaatagctacagtaactggcaaggatccaggactcctgcccttaggcatccagaattgtaagtgtttcagcatggccacctccaggaaactcattgtttctaggtctcagatttgtggagaggacgttttctggcgtgctacatggcttatttctgtcaccactcccaaacacccagctct

SEQ ID NO: 95331 - DNA, 26237 bp, Homo sapiens
tccccagctgtcaagggctgcctccctctgttctgacctcatcgttattctggcagagtatactctgaagcgctggcttattttggaggggatgcaaagttttctcccacctaccctgtggggcagactcaaacataattctttgcttttttcttccccctttgcctgacttgcagttcgtctaatgattgaaaatccttacgagacccgctctgacagcttctactttgttgacaacaagctgataatgcacaacaaggctgattatgcctataatggaggccagtaagtgctgcaagagtagrtaggggaggtgctttgccgcggccacaagatcctggcacacggagatgatcgaagctgcagtttgtcaacacacatctggaacctggccccaggaagccaaggctggggtggcagtttcctgcgcgccaaaggagctgccaaacagtgctgtgttttcttccccagtattttttcttccctttttttcctgccccgtaggttgcagaggtactatagtaaagtaaaaggttaggataagggtcctggaatccagataaaaaagtttattttccgtagttctggctgcctgttggttgtcttgacgaccaggcatagctgtgcctggtgagaaggctctggccaggcccaccagcaggtcagcagctcttaaggttcctgggtgctgtgggaagctgaaaggtaggcctcttccaggtagctcctcctctcacctccggcattgccatcagcgcagtctgccctcggtctgtgtgaagtcttaaaccaactggaagacacttgaaagggtggggagggagggaggtgccaagagtggaggcaccaaggaatgggtgatgctgccaagctgaagggtctgctttgtggagaggctgctgctctgtctgacttccagggtctcagccagccctcctgggaatagaccaagttttcagcctggcagtgccttctgttcccattttggaggacagacaagcttgctccacatctcctggctcctcccttctgagtctcatgaaatagaatgagtcagctctgctcatggaacagtagtatctcttgaggccagagcaggtcttgtattttgtttttttatttccagacttctttcggggaggttttataaaatgacagtggtgttcccagcatatgtgatatgtggttagacttctgatagtatcagcttccaggggctaatctggcttatgttgggaggatatgcttacgaatcagcagcagctttctaaaggagagatttgacttttctctgcactgcacagcctggaggattggcttttgatggggatttgcctccgaagctctttgtacatttcttgtttaggagggttttcctatctacctttctactgaagtagtttctggaactttcctggtggatcagagttacgtaatgcagtctgagccttcagactgctagttagaattgttttaggtgttcagaaagggcaaaataggctgatgtggcctgtcagagtgatgtgttctcaaaaaagttcacttgcacatctgtgggctgcttttgtcctcagacccttagtggacagactccacaaaccctctgatgagacgattgatgtggccagggtccagttagcatcagtagaaggatgtcactaggaaaggcccaggtatctggtaagtgactgtgaggtgtcacagtacctgtgacaggagagtgtcctgatgtgcttgggagaaaggccgtatgggggccagggatggaagagacagtgtgtggccacagaaattcctgtccatccaccaccagtgctgctccctgtgtgggctttagggcgagtggccccgaaccttggcccagtgctttgtcccaggccagagtcttggcaatgccacatgctggcagctttctcactgagaaggtcctagcttacccctgtgtgctggccttggattcagccccgagagaggggagagaccattcctcctgtggagtgggttccttatcaccagaccggccactctcagaactggcgtccactgtaaatccaggtgccttacgtgtggctctgtcccttaygctgcaggggaaagctgcattgccattgttcccacctcctcactggcagaaagatgccagggctgttagcactgtctcctcaccttctgtttctcattgtggctcctcaaatgggatttgcatgttcctgtcaagcgtaacaacaatcccttctctctttgacagaggcccaggtgggacagtttctactatttgatatttgagtattatctgggatgtggttctggagctgcccagagctgtgcttagtagagtgtgtcttggaaacatgcccctgggcacactgtatctgctacattagtgggctatctcttatctgcagtgttcgcttttgctagaaagaggatgtggaggaaggaggaggtgggcaatctggcttgagttgtgctgtatcctcttccttgttagcttgccttagtctcactggagaccatttgcggatagtgcttggtccatgcccagcaggacagggctttgctgcttctgaaagtctggtgttctgtatctggggctgtgggttcctgtgtctagctgctcaggaaatcttgagaagcattccactctggggtgtaaaccagtatgagtttgaaattcaagcgtttgtacctgagttggggagagaattgcaaggcatactttctctgaaagtaacagaaccattcaggctgccatgttattaaggaatctgaactgttgatagcagttaccttgtgggtgatacaatgggaggcggcaaaaaaactacctgcataggagaccctgccctttgtcaagagctgggagcacatttcatcagagtagcaggcccacctggtgccagagggcctgcccctcctgcttctgttcctttgccttgcagtctcctggagagagcctctcttttcctgtacagcctttgggccaaaatgcccttctagcttctccaaagaagatccgagtttatttcattctatgttttaagaggtaaaaggacataacaagtgaaagaagttttgggctaaagtaggctatgtctccttatgtattactcaatactgttttgcagagaaaacatttttcaagcatgtgcttcctgaagacacctcagtctttgggccatttgatttccaatacatagggtggaagaatgtgattttggggctgaccataaactggaaatttgtgaaatggcagtgrttgggcaatcttcagtttattttttcagttgaagtggaactcatttctggaatggatttaataggctgtgtctaatgtacaaactgggtgagtcctgccttagtgtgtcctgccccaccggtacgcttccaggatactcttttcccctctgtaaagtcactttcttctgatggccagtgtcactatgatgtcagtgaggtctggggatgaggacagtgtgtcctgaaattcacaggactgactcctcaccccagtgcacgaggattcctgtggcatcaggtgctgctgtacctggtgtaggagcctaatcattgaaccattgtgttactcacattccatgtcacagaacatatcagcctcaagaaggatttggtggaggtggatttaccactggttttacaaaggaccgtgtaaagtcattgaagttgtgaaagtctattttttttcctgtaaatctattttttacagaatrtaagaaacatcaatgacctgatctgtccttcctcctccttcccgcttcccccaaaatcacattccagtttttattgtctttgtgtccaaagtaaactaggtgacttatttgtataaaatgttattttgccacatgagacagtaataaaagaaagattttcacagtacgtctccctcgtcctgtctcctgattgttgggcccgttgtgttgctgaggggagcaggggcgaatgggggctccaggtttctcttactttggctattatgtggcccttctgtaagtagttgaactagagtatagctggcttctagggtgattgaggaattgtactggactttaggcttaatatttttgctttatattttcccagggtgagtggctttgtaaattgaaagtttacatgcatgttttaaaggtagggtttttttttttgagatggagtttcgctcttttttcccaggctgggatgtgatggcatgatggtggctcactgcacccttcgcctcccgggttcaagtgattgtcctgcctcagcctcccaagtagctgggattacaagtgcatgccaccacgcccggctaattctgtatttttggtagagacagggtttccccatgttggccaggctggtcttgaactcctgacctcaggtgatcaacccgccttggcctcccaaagttctgggattacaggtgtgagccactgtggctggccataaaggtaggcttattaagaaatactttaactacagtaaaatttacctcaattaagagtattgatgcattttgacaaatgaatacttttattacccatcacaatcatgatataggacatttccatcgtacccactcagaaagttcctgagttccttgtgtttgcagccaggtgacttcccccacttcgcctcttgcaaccactatctgattctgtctctattggaaaacttggatacttttaaaatgaaatttgaacgttcatatttacagtcacaaattctcaagagtctggtttagatgctctgtggcacctgaagcaattattggcctttgctcacaaacacaactcacttatttctcccttttctcctgcttcttcatcgtttcttccacccagggctggttcccaggtgggatgactgaaaggtgaggaagcccttagagcatttgccaatgggagccattcatttgactttaaagtactgagaatttagaggcgttcttttaaatgcattatttaaaaagaaaggtaacacattaaggactttgctgcatcttttgattggctttcttctaggaagtagtgaccgaggtttccactttcctccaagaggaagagacagaagttttggcaaataggtcaatgctgggaacagatgcctgcctggctgagtgctgggaaagaaaggcagttggagggatgtgtgggtgcctgggagggcgtgggtggtgcccaggaggctatgggaatcagaatcacacttgcacaagagaagacccttatgggacaagtaaaatcagcatagtttcttgggcggggcaaaggtgtcctgatgaggatgctaggggtcaaatatgtgtctgggttctgccccaatcgggaatgagacacagtactgaagtggaacgggggtagcatctccacccaccttcacagcctctggggaaaagaaagctttccttgcagcccaactccaggggcctaaatattgagcaccaacacaagacaggtccttgagcttctcggagcgagtcggggaagcagataatttcagatgcaaagtgccttgaataaacagaacgaaagatagagagccagagggggagaaacggcttggtgtggtcagggcaggcatccatgagacctaaacgaagagggggcattccagacaaaaggaacagtgatcacagaggccccgagtcaggaaccagctaagggtcttagagaagagctgcctcgtaaagctaagcaacaataaccagggaacggtgggcatgggccctgatagacaaggcaggtcttggctttttaagccatagaattggattttaggagggatgggcccgccgacaaagccaacaaagttttaacccgaagatcgctatcttatttatgctttaaaaagacctctctggcctttctgcgaagctctatccttagctttctcttgttagcattttgattaacgaatgtgggcacgaacagccagctgaccgaccgcgcgcgcagtcgagcgtcggttcctcgccttgggagggaccactggargccccgccccctggccgcgagcgcacctcggccccgctcccgaggccctacgggcgtggcctctgtcccgggtcccgccccccagcactccggaacagcgcgctcgcagcgggaggtcgcgaagcctgggactgtgtctgtcgcccatggccgccgcgctgctcgcccgggcctcgggccctgcccgcagaggtgagtgcgctggggatccgtacggcggggcttcagcccgcgtctggcccagcgggcggaggtcctggcggccggctctgtcagagccgctggcaggcggagccccactccgggagcgctcacggcctttgccccagttctgctgctccttgcgccgacccagcccggcccttcaggcgtccctggttcctgcacagacccctaccccccgattgaccccagccaccagcccagttcccagttcccatatctccctcccttcatttcacccccactagaggttcagggtgcgtccttcttccggagccaggcctgggattgaaccagacccgcatctgtgaccttgggcaagacagcccctcctcagcctcggttggcccatgtgtaaaatgtccacagagaaaatcagagttgttgggaggattaaatcatagggtatgtaaagcacttcgtgcctggcgtgtaacaggtgttccacaaatgctcgttcttgctggttaatacagtacctttcccatcttacgtgtctccagttgtagcagccgtgacacatatagccacggcttcctttgcctggcctgaattacaaggggaacgctactgagaactgtgttaagcgctagttagtctttctttcgcactccgaggagcggaatactattcgcctccacttgttatagaaacggaggctcactgacgtttaaaacccttgcctaaggtcacagagctgaggtcttattactgttggtattatactgaggactgaaggatgtagtgtatggaaatgtctagtgagtgtactaagcattcagttagtatggggttttcagtggccgccatggacattttgggctgacagttctttgttgtgggggctgtcctctgccttgttggatgttcagcagggatcccggaccyctatccactgggtaccaatagtattcccctgctctagttgtgacaactagaactggctccagacattgccagatgtcccttggagggcaaaatcctccctggtgagttagtgggtcactaggattcttggagacctcctgcctcctccttccactcacttctgcccttgccggcagctctctgtcctagggcctggcggcagttacacaccatctaccagtctgtggaactgcccgagacacaccagatgttgctccagacatgcygggactttgccgagaaggagttgtttcccattgcagcccaggtggataaggaacatctcttcccagcggctcaggtgagagtgcaacctcagcagcccacgatagtggtctgccctctgctactggatgaatggtggcagtgacagtcagcggcactcggactytggtagaggaaccccaaagcagggcctggaacccagaaaatgctctggaagtttcccttgtccagcctgtggccagtagccaggacttaacttctgggacaacagtaatatgtggtggatggtcagttgcttactgtgccagccactgtgctcattctaaatagtgcctttagggtgtttggcatgcactaggcactgttcttgagatgggttatctcatctgttcctcacaacggtcctgtgaggtgaaggtactattcttatttatttttttgagacggagtttcactcttgtggctcaggctggagtgcaatggtgcgacctcgcctcactgcagcctctgcctcctgagttcaagtgattctcctgcctcagcctcccaagtagctgggattataggcgtgcactgctctgccccgctacttttgtatttttagtaaagacggcgtttcaccatgttggccaggctggtctcaaactcctgaattcaggtgatctgcccacctcggcctcccaaagtgctgggattacaggtgtgagacaccacgcccggccaaaggtagtattattatataccccatggactcagacttgtgaacaagttaaataacatacccaaggtcatggagctcatcagcggcagcctgctcgacctattttcttttttatttacttatttttttttgaaatggactctcgctctgttgcccaggctggagggcagtggcgcaatctcaacgcactgcacccctctgcctcctgggttcaagcaattctcctgcctcggcccccagtagctgggattacaggcgggcaccaccacgcccagctagtttttgtactttcagtagagatggggtttctccatgttgggcaggctggtctcaaactcctgaccttaggcgatctgcccgccttggcgtcccaaagtgctgggattacaggcgtgagccaccgtgcccggcctgcttgaactgttttctcccctgagtttcccatcagcgcgctccctcccgtgccactgtgttcttccatttgcattcagtctgtctgcagctacgcgttgaagatgttactgccgtacacgctgacctaaagatgtccagcacctggtgtaaacactcagtagtagatagttgtttaattaatgatttgtgaaaagtcaaacctctccggcctcttctccttgcctgtttttttttttaattttaattttaatttattttttatttttaaaaattttttgagacagtcttgctctgtcaccaggttggagtgcagtggcgcgatctcggctcactgcaacctccgccttctgagttcaaacaattgtttcctgcctcagcctcccgagtagctgggattacaggcgcacaccaccatacccggctaattttatgtattttagtagagacggggtttcaccgtgttgcccaggctggtctcaaactcctgagctcaggcaatccacccgcctcggcctcgcaaagtgctgggattacaggcgtgagccaccacacccggccttaaaaatgagttttaaaagggacgtaaaacattgtttttatatgagggacccactaaccgtttcccagatatgaaggcagcaggtgctgcaggcttgccttgtctgtcactgctgggaaaggggtcttacagtttcttacggtttctcttgggagtctggagaccaccaggctcagcctcatcagtgctgttgcctcttctcagggtgcaggtcagggttgctgggtcacagacactaggaaccaagagtgaccattgcagggggctctaggaggccaccccttgagatagctctgaaggtcaggcctctctgtagaaaatactaaaatattggggctgggacgggcgcctggctgctgttagttaattaccatcaatttacataggtcagaaacgatggacaaacccgaacccatttttttcccttgrctgcttctctttttcttttttcttttttttttttttttgagatggagtctcactctgtcccccaggctggagtgcagtggtgcgatcttggctcactgcagcctctgtctcccaggttcaagtgattatcctgcctcagcctcccaggtagctggyactacaggtgcccgccaccatgcctggctaatttttgtatttttagtagagatggggtttcaccatgttggccaggctggtcttgaactcctgacctcaggtgacctggctgcctcagcctcccaaactgctgggattacaggtgtgagccactgcttaattatattttgggtttctcctttttgactgtytcgtctcttccctctcctgccacccctttttccttccctcggtgctggtctccctgtctctttttcaggaggccctttaacgagtgcacattaccatggttattgcttttgtccccactttttttctagaatgttcctgtagctggccacagtttgttgcctgaaatctagagataaatttcagagtgagaaggcctgggaaacagcccctgtcaccactgataaaatggggtgaggtgactgtgtccaggctctgggatgggatggagaaggctgtgctcttaggtgctgccccagagcggtgctcctctcttttgaaatttgctgtctcaacaccagagtgggagtgagtggaactgccatgtctttcacagccacaggtagatgctttattttttaaattatttttgtgtgtgtgtgatggagtctcgctctgtccccaggctggagtacagtggtgcgatctcggctcactgtagcctttgcctcctgggttcaagcaattttcctgcctcagcctcccaagtagctggaactacaggtgcgcaccaccacacccggctaatttttgtctttttagtagagacggggtttcaccatgttggccaggctggtctcgaactcttgactttgttatccgcccgcctgggcctcccaaagttctgggattacaggcatgagccacsgcgcccagcyggtagatgctgtaaaagaaaatgctgatggtgagaaaggagggaagacaggagctgggggaaaattgagggcgatggtatatgctagtgaggtcctttgggtgtgggaattgtgaattcctacaacttttgattctagctcattgagaagtgtcgcattagycagagggaggcggcgctgtgtagggaggaggaggctggggttctgtcttgcctcctggtggcctagacctggccactgacaccacataccctttctgtgtgaattccctcatctgtaagaggaatatggggtcaccctcattctgctacctgtcgggacgtgtgaccaagcattttaggtgagtatgaggaactgaacgcacctaggagagtttcatccttttactctctttctgggaatttgggttcccactgtgtttctggggatgagatggagttatggagcgattggctcatgtgccatttattccagggttttataccaacaagttccggggtgaaaaggagggtgtgtctckgtccagggagatctgaaggtgcttggagggtgaggcggcttgagctagtttagccttattctgttttgctggtaagctagagaaaaaggcttttggtgaggttcatgcctaggcctgaccgtgagtcttggacaactgcatatttatttttgtttttgtttttttgagacagggcctcactgtcgcccaggctggagtgcagtgacacaaacacagctcactgcagccttgacctccygggctcagggctcaagtgatcctcatgcctcacctcctgcagtagctgggaccacaggtgtgcaccgccatgcctggctcatttatttttatttttataactttttgtggagatgggggtctcgccatgttgatgaagctggtctcaaacgcctggactcagatgatcctcctacctccgtctcccaaagtgctgggattacaggcctgagctaccacaccctctttttaaaatttttttaattaaaaaattttcttttagaaacaggggtatcatcatgttggccaggctggatttgaacgcctgggctcaagtgattctcctgcctcaacctcctcctgagtagctggagacctgcgtatttctagcacttggtagagtattgtccagcagcagaggtgttccttaataaaatagtttttttttttttttttgaggcggagtctcactctgttgcccaggctggagtatagtggcacgatcttggctcactgcaacctccacctcctgggtacaaatgattctcctgtctcagcctcccaagtagctgggattataggcgcccaccatcacgcctggctaattcttgtatttwttttattttattttattttttttattgatcattcttgggtgtttctcgcagagggggatttggcagggtcataggacaatagtggagggaaggtcagcagataaacaagtgaacaaaggtctctggttttcctaggcagaggaccctgcggccttccgcagtgtttgtgtccctgggtacttgagattagggagtggtgatgactcttaaggagcatgctgccttcaagcatctgtttaacaaagcacatcttgcaccgcccttaatccatttaaccctgagtggatacagcacatgtttcagagagcacagggttgggggtaaggtcatagatcaacagcatcccaaggcagaagaatttttcttagtacagaacgaaatgaagtctcccatgtctacttctttctacacagacacagcaaccatccgatttctcaatcttttccccacctttcccccttttctattccacaaaactgccatcgtcatcatggcctgttctcaatgagctgttgggtacacctcccagacggggtggtggccgggcagaggggctcctcacttcccagtacgggcggccgggcagaggcgcccctcacctcccggacggggcggctggccgggcgggggctgacccccacctccctcccggacggggcggctggccgggcgggggctgcccccaacctccctcccggacggggtggctgccggacggggtggctgccgggcggagacgctcctcacttcccagacggggtgtctgctgggcggaggggctcctcacttctcagacggggtggctgccaggcagaggggcycctcacttctcagayggggtggctgccgggcggaggggctcctcacttctcggggcgggcaggcagagacactcctcacctcccagacggggtggcggtcgggcagagacactcctcagttcccagacggggtcgcggccgggcagaggcgctcctcacatcccagacggggcagtggggcagaggcgctccccacatctcagacgatgggcggccgggcagagacgctcctcacttcctagatgggatggcggccgggaagaggcgctcctcacttcccagactgggcagccgggcagaggggctcctcacatcccagacgatgggcggccaggcagagacgctcctcatttcccagacggggtggcggccgggcagagactgcaatctcggcactttgggaggccaaggcaggcggctgggaggtggaggttgtagcgagctgagatcaagccactgcactccagcctgggcaacattgagcactgagtgaacgagactccgtctgcaatcccggcacctcgggaggccaaggctggcagatcactcctggttaggagctggagaccagcctggccaacacagcgaaaccccgtctccaccaaaaaaatacgaaaaccagtcaggcgtggcggcgcgcgcctgcaatcgcaggcactcggcaggctgaggcaggagaatcaggcagggaggttgcagtgagcagagatggcggcagtacagtccagcttcggctcggcatcagagggagaccgtggaaagagagggagagggagaccggggggagagggagagggagagggagagggagaatccttgtatttttagtagagacggggttttaccatgttggccaggctggtctcgaactcctgacctcaggtgatccacctgcctcagctaccaaagtgctgggaatacaagcatgagccactgcgcctggcaaagtactctgaagtgtgggctagaaaagtgttctrttcagaggccatgtgtgtgctgccgcaggtctgtgtctccaggtcctcttcctagtgaaaagcactctctcacttggacttccccttccctagttggttcctgcctgctgaaatggtgcctgctgaaatggtgcctgctgaaatggtgcctattctgagcaggacccccctccccaggtgtgtggcggccacagaacaatcttctttttagtaattctcaaaatgacacctccctggtagctctgagttcccatttgtcactgtggatgagtttcctattgctgctgtaacaaatgaccacaaaccctgtggcttaaagcaatacagatatattctctgaccattcaagaccagcctgggcaacatagcaagaccccatctctaccaaaaaaaaaaaaaaaaaatagaaaaaacaaaaccaaaccatggcagccacttgagaaatgctgttcacgagttactcaacccgagtcaggcatccagtgtgggtcccacagggctaaatcaaggcatcggcaggactgagttccctctgsaggctctggggaaatccactcctgtctttcccagttctagaggccgcctgcattcttcccgccagagttcctgcctctgcttccgtcrtcacctctccttctctgagtctgtgtctgtctttgccttacaaagactctgtgatgacactgggtgactctgatcatccagaataaccctcacatctccagacgcttcacttacgtgtgcaaagtccctattgccacggaagggaacatactcctgggacctgggattaggatggggacatcttgggcggttgctgtcatgctgccttccacacactggccatctccttcccagcttctctgccctctgactgcagcacagcatctgcctgggggccgcagagcttgatgtgcacttgtgggggtcatagctcaagcctctcagcacacacgtttatgccccacatgtggtacgtgtgggagactcggagatgacgctccgccccgcacttagagtcttacaagtgagtttcccatgggaacagttcaaggaagaatcaaataagcaatttcacagagggacacacaggttgtcacagaagtgctgcaggctcctaggtgccccctcttttccatacgttattgccaaagtaagaactaggcttggtgtggtggctcgtgcctctaatcagcatgagggaggctgaggcaagaggatcactcgagccaggagttcgacaccagcttgggcaacacagtgacaccctgtctctaaaaaaacaataatttttttttttttttttttgagacagattctcgctctgtcgcccagactggagtgcagtggcgtgctctcggttcactgcaacattttcgttccaggttcaagcaattctcctgcctcagcctcccgagtagctgggattacaggcacccgccaccatgcctggctagtttttatatttttggtagagatatggtttcaccacgttggccaggctggtctcgaactcctggcttcaaatgatccacccattttggccttccaaagtgctgagattctttgggagactgagccaggcgcatcacttcaggtcagaagttcgagaacagcctggctaatgtggtgaaaccttgtctctaccaaaaatataaaaattagccaggtgtggtggcaggcacctgtaatcccagctactcgggaggctgaggcaggagaatcacttgaacccaggaggtggaggttgcagtgagccgagactgtgccactgcactccagcctgggcaacaaagtgagactctgtttcaaaaaaaaaaaaaaaaaagaaaaaagaaacaaacaaagtgctgggattacaggtgtgagtcactgtgcgcagtccttaaaaaaaaaaaaaaaaaaaaaaaaaacaacttggcagccacttgatgatagatgctgttcaacagtacctcagcctgggccaggtgctgggctctgcctttcatgtgtattatctcagtcaggcctcagaacagtcctttgaggtgagtactgttttggggacggggaaggtaaaacttttatattcacaggagtatagaaaaacaagaatatattagcaaacattcttattagtttatgtaagtcatggtagtataagaacatggttgagactaggtgyggtggctcacacctgtaatcccagcactttgggaggccgaggtgggtggatcacgaggtcgggagttcaagaccagcctggccaagatggtgaaaacccgtctctactaaaaatacaaaaattagctgggcgtgattatgggcacctgtaatctcagctactcggtaggctgaggcagagaattgcttgaacctgggaggaagaggttgcagtgagccgagwtctgcactactgcactccagcctgggcaacagaacaatactctgtcacaaaataaaataaaataaaataaaataaaataacatgtttgcaggaatgagattgtataaaagggctcgtgaaaagcaacggttccctcccgtccccatccctgtccccgtccctgtccctgtccccgtccctgtccctgtccctgctctcccagagataagtggttttacttgttcctttttgaagttaggtagattctgtggtccacatttcccatattactcacctgaragtaataatactattattattattttgtttttggtagagatggggtcttgctatgttgcccagactggtctcgaactcctggcctcaagcaatcccctcaccttggtctcccaaagtgctgggattacaggtgtgatcactgctcctggcccactcttaatatgattattacccagaattaagagtcccaagctcttatccttcattcattctctcactggccttgggcatgtagcagtgagcaagagcacacacagtctgtgccctcgtggtgaaggcaaaagaccttaatccagagaagcacgttcatccctgagaaattccagccgcagaagtgctgcaggagagggactgaaggatttgactcagcgaggctggggatggcagcccaaagcagcgaggcctgagctgcgatcagaaggagaggaggggcaataaccagctgagggataggaggtggcatgtgcagaggccctgtggtggggagggtgcgtgtgtgtggatgtgcagagggggctggacgaaggtcagtgtggctcacgctgtcctgctccttacctctgagttccctgaaagcatcctgtgccttctgcttgctcgctgccgtggctgtggacggagcggggagcaggcgtggaggcgggggcaggacagcttgaatgagaagtgccatcatatagacctcagtgggactgggtcttcagcttctggacttgkggatcccttgtgcgtggctggggtcacatggcctgagtttctgcagggcactgcctcgggggcaggagggtttgggcttggggagggtgggctcgcccccggcagctgcccatggygtgccgtccttccctgtgcccaggtgaagaagatgggcgggcttgggcttctggccatggacgtgcccgaggagcttggcrgtgctkgcctcgattacctggcctacgccatcgccatggaggagatcagcygyggctgcgcctccaccggagtcatcatgagtgtcaacaacgtgagccccctcccaggcccctgggacacacsggtggagggaggctcccgtgagcgggcaggctctggcctcggctcccagccctgatctctctggagacgtcacaggccttggtcctactgggtaggccctggacagaacaggccctgaggtgcagcccgcaggtgggcaggatgcrcctgggcctggggcctccgaccgctccccgctgtcctcctagtctctctacctggggcccatcttgaagtttggctccaaggagcagaagcaggcgtgggtcacrcctttcaccagtggtgacaaaattggctgctttgccctcagcgaaccaggtacctgccctgtcccctcacctgtccttagggtgacaggcccagaggggaggagaggaaggtgctaggccaactgcccactgcttcggaggccagaggggaggctccccgtgtggttggtagggtgagcgctcttgccaccgcggcgctgggaggaagattgccttcggggtcccctggtttaagacgccagctcctgcacacccccctcgccmtctggtcccatcactgagagctttgggaccctcatcttyggagcccgagtcatagggtttcgtgtctgccagcasgggtgtggagggagtgaggctggtgcccttaggttgtgtggggtggggcrtgcgctgagccctgggtctgtgtgggcagggaacggcagtgatgcaggagctgcgtccaccaccgccygggccgagggcgactcaygggttctgaatggaaccaaagcctggatcaccaatgcctgggaggyttcggctgccgtggtctttgccagcacggacagagccctgcaaaacaaggtgggcccacccagagaggggttcagccggatcctgggctgctgtcatttctgtttctagggccttctctccttggcccgactggacctatttttgctctggggcaagtgggctgtccctgtccctcctcagctgccactgaagcctgcaccttccccagaagccggcagagggtgtcaaggcctgagcttcygagggaggtggggagrggaccgggttggtgttgggtgtgctggtgtgagggtgtggctgaggggcagctctgagaaaaccacccgcctctcctttcagrgcatcagtgccttcctggtccccatgccaacgcctgggctcacgttggggaagaaagaagacaagctgggcatccggggctcatccacggccaacctcatctttgaggactgtcgcatccccaaggacagcatcctgggggagccagggatgggcttcaagatagccatggtgagcccggcagtgggggtggcaccttgaggccaggcccgcgccccggctggcgggccactgaccagggcggtccccacagcaaaccctggacatgggccgcatcggcatcgcctcccaggccctgggcattgcccagaccgccctcgattgtgctgtgaactacgctgagaatcgcatggccttcggggcgcccctcascaagctccaggtcatccaggtaatggtggcagctttaggagctgggcctagaggctggacagcgggcggagagtgtggcctcctgactgctctcygtcctcctccccctcccttctgtcccctggaggggcagctgctgacctgtggtgtggggtggggctattgcagttcaagttggcagacatggccctggccctggagagtgccyggctgctgacctggcgygctgccatgctgaaggataacaagaagcctttcatcaaggtgcccacaggggtccccgagccatggcccagaatgtggtgggcccagggayggggagaggttggggcgggtctctgctccttggccccgtgggtcagaggtgtgggcctggggtttacagccccatggggaggctccacaggcctcccctgctgagggagtgggggagcaggggatggaggggtcccctcaagggaaggctctgactgtacccccatgtttaggaggcagccatggccaagctggccgcctcggaggcsgcgaccgccatcagccaccaggtgagtgtccacagtgagctctgagggggccagctgccccttctccagctttccccacgccggggtcttctccctcctgagcmactgttctcatctcaggccatccagatcctgggcggcatgggctacgtgacagagatgccggcagagyggcactacyrcgacgcccgcatcactgagatctacgagggcaccagcgaaatccagcggctggtgatcgccgggcatctgctcaggagctaccggagctgagcccrcggcggactgccccasgactgcgggaaggcgcgggagccaggggcctccaccccaaccccggctcagagactgggcggcccggcgggggctccctggggaccccagatgrgctcagtgctgccacccagatcagatcacatgggaatgaggccctccgaccattggcagctccgcctctgggcctttccgcctcctcaccactgtgcctcaagttcctcatctaagtggccctggcctcctggrggcggggttgtgggggggctgagcgacactcagggacacctcagttgtcctcccgcgggccctggtgccctggcatgaaggcccagtgcgacaggcccttggtggggtctgtcttttccttgaggtcagaggtcaggagcagggctggggtcaggatgacgaggcctggggtcctggtgttgggcaggtggtggggctgggccatggagctggcccagaggcccctcagccctttgtaaagtctgatgaargcaggggtggtgattcatgctgtgtgrctgactgtgggtaataaacacacctgtcccccagtctgtgtcctcgccctctcctgggtgctccggggagggatggtggtctctgcacagagtcctgctctctgacagtctcaccctgtgagtgttgggggtcttggggaggggcctggccacctgggaggttcctgagttccggcagaggccagattggccaaggaggcagttcaggaataggaactgggtcctgcaggcctcagggagtggcccctggggagggagggtgggccaggcagggccagtgggctagaaggggttctctacgcaggaccagcctccaggcaggaggaaggaaggccccagattgccagagtcggggagcaaagctgtggaggcctcgagccccaggtgggagaacacagaacctcgagaagcagccattgtgctcactagcgcgctcgggggcggccctggccagccagtgcgggggcttgccctggtcctggtgcctgcagggctttctctgggcaaaggtgcccctgaagccaaggtccaagctcttaaccctctgggccagtgtcgatctcagcagctggaagagaaaacagtgagcaaagaaagatttcaaaggaggtggggacagccctccgccgggcaggcagggcagagagtcaaactggcattgctgggaggtctctggagggaagcgggagggagacggtgactttaggagctgtcatcaaaggggcgcccagggaccctgagcccctgttggggatggatttttttttagagacagaatctcactgtcacccaggcaggagtgcagtggcacaaccacagcttatcagaacctcaacctcccaggctcaagtgatcctcccgtctcggcctcccaggtaactgggactacaggtgcacactaccatggccagctaatttttaaattttttgtagagatggggtcttgctttgttgcccaggctggtcttgaactcctgggctcaagtgatcctcccacctcggcctcccaagtgggatttctgtgccaggtgctggtgccccgcagccgaaggatccagcctggagctgctgctctgcagggcagctctgcccttgaccccgccctgacctgggcctggtccagggccccggggaataggagtgcgcttctttgagcgaatttaggtcctgatttaccccacaggcagggtgtgcgcagagcccacgggtagtgtgttccctgctaacgaggcacacctgtggcttctgggaagcgcgtcctcctgggctcccgaggtcagtggcgtcctgcgcagtctgcagaagtttgggtccctgggctttcctcctggctccaggtaagtgccgcctgcagaagtttgggtccctgggctttcctcctggctccaggtaagtgccgcagggtcttggctcctggctcacactctctcggggtctcctgatctgctcctgtccctgccctgggctcaggtgcaagccaaaggtagcagagcagagggggacccaggatgcttccagaagcagcgcatttgagcccttccacctgggggcagatgaaggcctgtcattccctgtccccatgagcccggggacagtggggagggggtgtttggaggcgctgtgcccccgcccggcgaggcagcgctgctcctgacgcagatgcggcgtggggttgaggttgtctttgggcccttcctccaggtgatgggggagaggaacccaaacagcattcatcccaggctggggacctggctgtcttggctggagttcaggcccctcagctcccctgccctacccgctgagaagggtctgggccctggagggtcaaaggtagccgacttgagccacaccgctcccagcagggcagagggctggagtcagcacaggccgagtggcagccctggaggggtttctgcttctcagacctgcccagggctcgttcaggtggccacgaagagcctttccaggaagtgcagcctcggaggcctggggtcctccatttcagatgaagcaacccaggctccgacccaagagccagtctgtgcactcgggggctttgaggtgccgtcgtgggtccggggtctgtccttcggtgagggagagtcggcacaaacccttggctttgacggggtgctgcccgttagtggaagctcctcctaacttagaactgaatgtggactctgcccccgggccactggagcccgaactgtcctagagcccatgcccctctggatacagtttcctcagtgtagatttcctaaggacaaggacgttcacttacagaacaacaggaccgtttcccaccctggtcaactttcacatctgcacactccactcggattgtgccagctggcacggtgtctgcgaagtcagctcttctcaaggtccaggggcctgcattgcatgtagctgagaggccacctgtttccttccctctagccctctgggacaagttctccatgctttggttctttttttttttttttttggagatggagtctcgctctgttgccaggctggagtacagtggcgcaatctcggctcaccgcagcctccacatcccggtttcaagcgataaagcgattctcctgcctcagcctcccgagtagctggggttacaggcatgcgccaccacgcctggctaatttttgtatttttagtagagacgggctttcatcatgttggccaggctggtcttgaactcctgacctcaggtgatccgcccgcctcggcctcccaaagttctgggattacaggcgtgggccaccatgcctggcctgaattcatacatttctaagtgtggcttttgcttcatctcatacattttagtgtcatattttccttattactcagttttctgaggcccattgtgctttctattttgatttatcagttatttaggagagtattattatgttttgagacagggtctcttctcgcttgggctggagtgtagtggtataatcgcagctcaccacagccttgacctcccaggctcaggtgggcctcttacctcagcctcccaagtggatgggactacaggcgccaccacacctggctattttttgtatttttagtagagatggggtttcaccatctctactaaacatgtgaccagcccaggctagtctcaaactcttgggctcaagtgatctgcccgccttggcctcccagagttctgggattacaggtgtgagtcaccatgcctggccaaagagtattattttattaatatggggttttctgaggtattttttgttaatgatttttaaaaactgtgacggagtttacagttttaaccattttcaagtgtacactcagtggcattaggacattcatcatgttatgcaaccattgccaccatctagttccagaacattctcatcaccccagcaggaaactccatacctactgttgctggtttttaccttaattgcattgtggtctcagcacattttctgcactatttgaattttttgaaatctgttgagatgtgcttcacggcactaagttactttttatgaagattgaatattagcaatttggtttttccatgttgatacgtgaagttctagttcatttatgtggatggctgcatggtgtcccatgggataaactatattgaggtagtttcctgctttttactctataaaccatgatgcagtggacattctggcatgtgtgtttttctaatgtgagaacttgtgagcatttaaatcgaagtgggcttgctgggccttaaggctgtttatttcttcagcttcgccagatattgccaaatggccctccagaggttggatcagtggtcggatcaccctctatgcatatgcgagggttgatgacgcgcattctccccgttccttggcacccacagattttacaaacgttcttcaatatggttgtgattttaacttgcatctccctggtttcttgagaaactgcacgtcttttcacgtggtgattggtcattctggtttctgctgtgaattgctattgtctgtttcttctttgggttgtaattgatttgtaattgtcccacgtgtttactcttgatactaatcatttgtcagatatctggttgcaaaaggactcatacagtgtgtggttttccctttatttattatttttttttgagacagagtctcgctctgtagcccaggctggagtgcagtggtgtgatcttggctcactgcaagctccacctcctgggttcacgccattctcctgcctcagcctccggagtagctgggactacaggcacccaccaccacacccggctaattttttgtatttttagtagagacggagtttcaccgtgttagccaggatggtctcgatctcctgaactcatgatcggcccgccttggcctcccaaagtgttgggattacagcgtaagccaccgcacccagccttcccttttaaaaaatgggttcagccaggtgcggtcgtcacgcctgtaatcccagcactttgggaggcggaggcgggtggatcacctgaggtcaggagttcgagaacagcctggccaacatggcaaaaccccatctctactaaaaatacaaaattagccaggcatggtggtgtgcgcctgtaatcccagctactcgggagactgaggcaggagaatcgcttgaacctgggaggtggaggttgcagtgagtggagattgtgccactgcactccagcctgggcaacagagcaagactcatcttaggaaaagaaaattttaaaaaatacagtttagtagaaggaatacgttctagtgttcacacaatatggtgattattgttatcagtattttttgtatatttcaaaacaactagaagatttagtatgttctcaacacaaagaagcgatagatgtttgaggtgatggatacccagttaccctgatttgatcattaaacattttatgcatggatcaaaatatcacacgtaccccataaatatgtacaattattgtgtatcaggttaaaaaaaaaaaaggctcttatgtgtagcagaagggcagacatggtgcaggcaggccagagacctaacaggaatttgcagagctccagagcctgaagactcagccccggcagattgcttaggccaagggcaggggcgtgggaaggaaaacctggcatccggaaaacggagccatctgaacggatgcccctgatgctgctctccagcccaaactctccagggtgcagagggtggctgcctctccataggaaggtgagggcttctgctactggaagagtctgcggaagccgctcccaacaaggccacaggtgcccctctgcagcggccctcacctcctctcctggctgccgggcccatgactgcggtcgaagcccagtgtcacccagctggggacaggctggagctgatgagaaagcgacgctacactggtattggttttctactctagcaacacatcactacacgcttagtggcttgaagaaatacccatcttaaagggccaggcacagcagctcagccctgtaatctcagctcttcgggaggccgaggtgggaggatggcttgagcccaggagttcaagagcagcctgggcaacacagggagagcccatctctacaaaaaataaaaaataaattagctggacgcagtgccgcatatctagagtcctagctacacaggaggccaaggagggaagatcacctgaggccagggatgcaagaccagcctaggcaacatagtgagaccctgtctctacaaaaaaaaaaaaattagccaggctcagtgatgcatgcctgtactcccagctacttgggaggttaaattaggaggatcacatgaacccaggagttcgaggctacagcgagctgagattacaccactgcactccagcctgggcagcagagcaaggccctgtcaaaaaaccaaaaaaaaaaaaaaaccaaaaaaacaaacccatctcatagttttcatggttcaggagtctgggcgtggcttagctggatgctctgtccagggtctcacaaactgaaagcaagggactgcagtctcatctgaaactccgtt

SEQ ID NO: 95332 - DNA, 30697 bp, Homo sapiens
ctttgtgaaattgtcactgctctttaaatcctcataatatggtattgctgaaggatcaggtactaccaaacactggaaatataagaacttttataatttatgtaattaaaatatgtgatgctttccacttggggttagccagtttgaaaagttaaattggaatgtgtcatgatggacaaactccttgaaagaatcatctgcacttctggtctccatgcccccgaccccacccagcctaatctggcttcagctccctcctctcgcctaaaactgtgcccaccttgatcaccagtcgttttcttgagtacttttcaggtctgtatttcttaacttttcagaagcattcagcaatgtgggtgacttttttttaactctggttatgcccacctctttggccaccccagcaggtaccgcctaaatttctcttcctctgctcatcacttaaatttggggcttggccaggcatagcagttcatgcctgcaatctcagcactttgggatgctgaggtgggaggattgcttgagccggggttcgaggctgcagtgagctatgattgcaccactgctctccagcctgggagatggaacgagactctgtctctacattagttcattttggtgtgattcattcttccccaaggtaccagtgaccacgtgtatactgagggaaatcaaatatgtctttacatggagcaggtcactcgcttctcatccttgggtactaccaaatcattatccaaaatgcacccctcgaactccccacagccatacccactcctccttctctccttgggaatggtggctccaacagttactcaaggacacaagccagagagctgggagtcatccctgtcttctccttgcccctcacctatagtcaacaagaagccctgcccacccttcttccaaaatagacctagaatccaacccctcttctccacctgcactgcttccagccttgtcttgggcctcactgcttatcacctgcacccctgcgaagtgtcctaatgcatttccctgcatctgcccttgccctctgcggttcgtcctcaccatggaagcagccagaccaatcttaactccactacatgccactcccctaaatttgccactgccctcaggacaaaaagcagattcacctggcactcatttaacccagtggatcatttccatttcttcttcttcttcttctccttttttttttttttttttttgagacagggtctcactctgtcacccaggctggagtgcagtagcatgatcatggctcactgcagccgcgacctccctggactgaggtgatcctcctacctcagcctcctgagtagctgggactatgggcactcaccatcatacctggctaatttttgtatttttttgtagagatggggttttgccatgttgcccaggctgatcttgaattcctgggctcaagcgatcctcccatcttgactttcaaagtgctgggatttcaggtgtgagccaccatgcccatcccatttcctctttcttaaaacaatatcttcacttggccttcaaaccatcactcctgatttctcttccacctcactagctacttcttttccttcttctttgctggactcgtgcaactccctaaactccgaataatattaagtgctctggggctcagtcctgggtctttttctcttcctgctgtgtcatcactcccttggtgatctcattcagtgtcatggctttaaacatccctatgccggtgacccccacattttatctcaagtccagacctcctccctgtaatacagactcgcatatccaactccccaccacatatctccacctgggtctctgacagacaccccaaacttcagttccaaaactgagttccttcctcatctccatgcccagcctatcccacctcagttaagggcagttcaacctttctgttgctaaggccaaaagccccggacttagaccttgactctgatctttctctctcatcatactctacccattagcaagacctgtcagccttggagtcaaaatatatccagcggaatgacatgatgtccagattcacttccaaataacacagtagggaatctagggatgggggtagaattgaaaccagactgtctataagttgatcattgttgaaactggtgatggtacatggaggttcattgtattattccactttgtttgaaatgttccaaaatcagaaaaattaaaacatactatttcactgctaccactctgatccaagtcaactgacctcttgcctggactgttgcagtagcctcctaaccatacttctgcctccactttcacctccactccaccctctgcttctaatttaatttcctcccagcagccaatgtgattaattccattaaaatgaaagaccgtgtcactcctccactcaaaactctccaatgtatggtgtcagactcctacagaacaacaaaaaatgctccccagtggttccccatttcattcagagtaaagccaactcctaacagtcgtcttcaagatcctatccactcctgctccttgtttatggaataaatctttttaaaaagatcttatatcctggctgggtgcggtggctcacgcctgtaatcccagcactttgggaggccgaggcgggtggatcgcctgaggtcaggagttagagaccagcctggccaacatggtgaaacaccgtctctactaaaagtacaaaaatcagctaggtgtggcggtgggcaccttgaatcccagctgctcaggaggctgaggcaggagaatcgcttgaacctgggaggtggaggttgcagtgagccgagattgtgccattgcactctagcctgggcaacaattgtgaaactccatctcaaaaaaaaaaaaaaaaaggatcctgtatctatttgccttgccaccctttactacttaaaccgcattcccttccactctctgctcttgatcactccgttccaggcacactgatgttccttatacttgccaccgggcagtaccaccacagggtcctcgtactttccactccttctgccatgaagaatcttcttccttctgttacacacgtggctcactctaccttcttttttttttttttttttgagacggagtctcgctggagttcagtggtgcaatcttggctcactgcaagctttgcctcctgggttcacgccattctcctgcctcagcgtcccgaatagctgggactacaggtgcctgccaccacgcccggctaattttttgtacttttagtagagatggggtttcaccgtattaaccaggatggtctcgatctcctgaccttgtgatccacccgtcttggcctcccaaactcttcaccttcttatgtctttgctcagatgtctccttttcagggaggccttccctaatcaccttatgtaagactgaaacctaaatacatgcccccaacacacacacacacacacacacacacacacacacacacacacacaacctcttaatcccttctcttgctttgtttttctgcttagcacttatcaccrtcttctttactataattttacctatttatcctatttgttgtttgtctccactaccagaaagaaaactatctgcaggtagggatttttcactactgtttgttcactgttgtatccacagcacctgcctggcacagagtaggtgcccagtaagtatctgttgaatgagtgaacgaatgagtgaatagcactccaagattcaatcctgcccacctgtccaggtacatttctaacctctcccctgctcaccctttcatcccaaggcacacagcacacttgagtccctggcatatcctagcattatttatacttctcagcctctatgctgtaccctcatcctcctggctggagtgccagtcttttttattttttatttggagacagagtctcatgctgtcacccaggctggagtgcagtggcaccatgatagttcactgcagcctgaaactcctagactcaagtggtcctcccacctcagcctcccaagtagctggggctacaggtggacaccaccacacctagctattttttaaaaaactttttgtttttaaaacaaaaactggagttttaaactccaggccaccactgcctctcacctgcaccactgtgcagtgtcctgaccatctccctacatctgttcttgcccttgcaatcatcctcaccacagaagcagagaagttacaagtgtggcaaagggcagaccggaattcaaagccaatgtggagtggggagttggatacatgagtctggatttcagggaagaggtatggatttaagatacaaatgtgggagtcactgggtatggtggctcacgcctgtaatcccagcactttgggaggccgaggagggcagatcaggagttcaagaccagcctgggcaacatggtgaaacactgtctctactaaaaatacaaaaagttagccaggcgcggtggcgggctcctgtaatcccagctccttgggaggctgaggcacaagaatcgcctgaacccgggaggcagaggttgcagtgagccgagattgtgtcactgaactccagcctgggcgagacagtgagactccatctcaaaaataaacaaataaataaaaataaaattaaaatgtggaagttgccagagtaaaaacatttaaacgctggctgaaatcaccaagggagtaagtctagaacaagaagagaaaaggacccaggactaagccctggagcacttaatattattcagagtttgggaagttgcaggcgtccagctatgttgcccaggctggtcttgaactcctggcctcaagtgatcctctcaccttggcctcccaaagtgctgggactacaagcatgagccaccatgcccagcccggatccccggtctttaagattcctctcaagcaggtgtctgctaacaccaaatgaaactcatctgccggcttcatgttttcatgcttttttcctacttaactcatcgcactggacttttgcagtctcttttttctgtgtctcctccaccgttctgggagtccccttggaacaggaacctcatcttattttgtcttcttggctcaatgcatgaacttcttggttcagtgcgtgaatcataatacctgttaaacccactctatgggccgggcgcggtggctcacgctgtaatcctagcactgtgggaggccaaggtgggcggatcatttgaggtcaggagtttgagaccagcctgaccaaaatggtgagacccccgtctctactaaaaatacaaaaaaaaaattagccgggcgtggtggcacatgtctgtagtcccagctactagggaggctgaggcaggagaatcgcttgaacccgtgaggcagaggttgtagtgagctgagattgcaccactgcactccagcctgggcaacagagcaagacccggccaaaaaaaaaaaaaaacaaaaaaacaaaaaaacccactctatgaatagtgagggtcaaagaggttagagtctggcacaggtagactagaattcccagtctgttctcttgggctccagattctcactccaccacctgaacactagtgagtcccttccgttcccaagcctcaatttccttagacagatgtaagcagttgaattgactaacaactatccaaccccaacctactgggcaagttgcctcctttggggtcaaacactatccaacttcagtttcccaacgtcataaaggagaactctaaaagttgagaatcgaaactgatgacagaytgactagacggccagcctgttaaggtggccccagatattccagcctcagcccagagtcctcctgtgcccctactgcagcaagggtgtctccaagaagggggacctggagtcagcccgtcacacctggtttcctctctgctagggtccctcctcccacagagcactggagggcagctgaggaggagctaccttaaaaaaggaggtgtgtgccagggagctgggtaggagcctggctatatatctgcccagcagcggtactctcgggacagagatggcactgatgcaggaastgtatagcacaccagcctccaggctggactccttcgtggctcagtggctgcagccccaccgggagtggaaggaagaggtgctagacgctgtgcggaccgtggaggagtttctgaggcaggagcatttccaggggaagcgtgggctggaccaggatgtgcgggtgctgaaggtagtcaaggtaagactgggctcctccagcccccacgcaagacaaaaccyagtatcagagtccacgtccctggggatgctggggacccctgtcctccttatccctagcccatgctgatgacatctcagaataccccatcccacctagctgtctacaccccacygcaccactgccttgagtagaatgagtctagtaataatagctcacatttgggggctcactggactaacctcttaacatacactatctctaattcttgcactctgtgagataggtactattctttgcccagtttacagattagcaaatggaggctcagaaccaatacaatgcgaggtccttggttggatcctagtgtgaatgaaccatctgtaaaatacagtttggggacaactggcctagatatcagatagtacatatatctgatataggaaatcattgttgattttgttaggtgtaacagtagttttgtggttatcagaaggttgtcttttgtttggacacgaacactgaagtattttagggacaaagttccttggtgcctataatttactttaacgtggcttagattaagcacatgtagccaggaatttagacttgttgaatcaactagttgggtatatgagtgttagttgtatcatctatttttctatgtgttttaactttttgataataaaatgactttttttttttttagagacagggtctcgctctgtcacccaggctggagtgcagtggcacaatcaccactcactgtagcctcaatctccctgagctcaggtgatcctcagcctcctaaatagcttgggattacaggcatgcaccaccatgctcagctaatttttgtattttttgtagagatagggtttcaccaatgttgcccatgctggtctcgaactcctgggatcaagaatatgcccaccttggcctcccaaagtgctgggattacaggtgtgagccaccatgtctggccggccaataaaatgatttttgtttttgttttttttttttgagacagagtcttgctctgtcaccaggctggagtgcagtggcacgatctcagctcactgcaacctctgcctcccaggttcaagcaattcccctgcctcagcctcccaagtagctgggacgacagcgcccaccaccacgcccggctaattttttgtattttagtagagacagggtttcaccgtgttggctaggatggtctcgatctcctgacctcatgatctgccctcctcggcctcccaaagtgctgggattacagtgagccactgcactcggcctaaaatgattttttaatggaggctcagagaggtgaggtgacttgcccaaggtcacacagtgttgaagctgggatttgaacttgactcaagggacccaagcccccctcactgagattttcccccaagcccttcctccagctgtttcatgccaccgcctgtgctagctaagatcaaaattcaagagggtcggagctagaaagactttggagaatcagacagtctcaccaatgactcacttaaaaaattaagtaaaccgaggcacagagagggtgagagataccccaaggtcacacagcgagttggtggcaaaggcaagactagaattaggacccctgactcccagcccagtgctcaagttctctctctaggggcaaccaactcacagagggatctagaagccctgggcccctatccgttctttgcacctatccccagcatatgaagcctgaggccatacaatttataagtgagaaaccacaaattttgatattagacagactcttcgcttcttcctttaccagctgtgtggttttgaccttcccactcttctttctcaaacccacattcttttcatctgtgattggggcatcatcatcatctctccctcaccaagccagtggtgcaatgcaggctgaatgattcatgcacgataaatgctcagaaacagaagcatcattataattcttgccaagctttcttctgggcctgggactcaagtctgactctggcagaccctcctagaccaccccctccccaacaaacttgagaataaagtggagggaataaggaatgtctggtaagaggaggatgctacaagaataagtttattgtgtgtgtgtgtgttccaccacgcctggctaatctttgcatttttagtagagacggggttccatcatgttggccaggctggtctcgaactcctgacctcaagtgatccacccacctcggcctccccaaatgctgggattacaggtgtgaaccaccacgcccggccaagaatgagtttttacggcaggaaatgctatttacctaagcctcaaatacttcctgcacatcatagccacttttcctcttgaaaccactaaatggtagcaatccccagtgagccatgactaatgaggaataatatatcttatttagagtctaaaccctcccgttccccaccctctgaaaatctagtgagcggagctggtccacataagggaatgctcgtcttcaaatgaattgtgcttaaataggtttaaaactgaagcaaatcaggaagcctgttctggatgtgttcttttctctctgcctggatcttaccagtgggaaaggcagaaagggaagtctacgccaggcacagtggctcacgcctgtaatcccagcactttgggaggccaaggtgggaggattgcttgagcccaggaattcgagaccagcctgggcaaaatggtgagacccccgactctacaaaaatatatataaaaaattagctgggcatggcggtgcatgcctgtagttccagctactccggaggctgaggtgggaggattgcttaagcccaggaggtcgaggcttcagtgagtgaagatcgtgccattgcactccagcctgggcaacagagcaagaccctgtctcaaaaagaaagggaagtctagactggccttcggggggaatgtgtccttcattcacacacagggtgccatctccaaccctctcccagggggtggaggtgctgggtctgaatgcccatggtcccttggaagcagggcctggctcacagccttgggtcacgaggaagaaagaggcggaagaaccatcccctacttgagttctggctctttctctgactctgctgccttctggctgggagaccatggcaagctcctcactgcctcagtcttctcatctgtacattggagataattctcctagtacccacctcaatacaggaagtgaaggcgtttttttttgttgtttkgttttgttttgttttgtttagatggagtctcgctgtgtcgcccaggctggagtgtagtggcgagatctcagctcaccacaacctctgcctcctgggttcaagcgattctcctgccttagcttccccagtagctcggattacaggtgcacacaaccacacctggctaatttttgtatttttagtagagatgtgctttcaccatgttggccaggctgatctcgaactcctgacctcatgatccgcccaccttggcctcccaaagtgctgagattacaggcatgagccatcatgcctggctgggaagtaaagattaaaaggaataatatgtatacagggctctyatgggtgccagacacagggcgtgctcatgtcatccagcatccgtgctcatgtcacacagggcatgttatatcatccggcaacagctggaatctgattcttgtgcagtgactccaaccaccaagaaaagtagccctctgggggtctgatgcctccctagcaattccacctcccaacacagaatgagaaggagaggaggccagagagttgtggcgctttgcataccagaggcaccagggcctggagagctcatctagaatctcaaaacatcgaaaaatcccttctcgacctccttccattactaacaggaaaactgaccccccggcagcagaagagattgtctaagtcagctggataatgagaagaaagagaaatgtattgctgacttcctgtgtgccaggcaccccaccaaacgcttggcatacattatttcatctgatcctcccagtagcccagtgactcttgttccaacattactttcattttacagatgagggtctcaggagtcagaatgtttacccagctaagaaacagggaagagtcaagatctttttcaggctgctccatttcacagcctatggctcttaaatccaccaggcaaacttgctccttgctttataatgtcatgaaattattcagccccaccaccacccccagaatcctcaaacaaccctatggagtagatgctaccattcctctggagtaggccttactctgtgggtaagaagactgggtctcagaagcaatgcagtgtagtagataagaagctgggcatttggggaggccaagggggcaaatcgcttgagtccaggagttcgagaccagcctgggcgacatgccaaaacccagtcactacaaaaaatacaaaaattagccaggcatggtggcgcaggcctgtagtcctagctacttgggagactgaggtgggaggattgcttgagccaagatcatgccactgcagcccagcctgggcaacgggagtgaaaccctgtgtaaaaaaaaaaaaaagagtctgggctctgagggctgcaaactgcgagacctgagacaaatgactaatgaggagaaagacaaatgtgttgctgacttcctgtgtgccaggcaccccaccaaacccttggcatacattatttcatctgatcctcccagtagcccagtgactcatattctgccattgctttcattttagagatgaaggtcttaggagtcagaacatttacctagctaagaaacagggaagtgtcaagatctttttcaggctgccccatttctccatcccatgtctcgagatcctccagacatctcagttttctcacctgtaaagtgtgggtattagtactacccacaacccatccctcagcgggtggtgagcattcagtgagacagtgcatgtgaagtgccgcaggggttgcctggctcatggcagtgggcctcagggtgacggggctctgtgttctgcaggtgggctccttcgggaatggcacggttctcaggagcaccagagaggtggagctggtggcgtttctgagctgtttccacagcttccaggaggcagccaagcatcacaaagatgttctgaggctgatatggaaaaccatgtggcaaagccaggacctgctggacctcgggctcgaggacctgaggatggagcagagagtccccgatgctctygtcttcaccatycagaccagggggactgcggagcccatcacggtcaccattgtrcctgcctacagagccctgggtaaggggaggggaagctcacccgactcacacacttgcccaccccagsagacttcccagtgtctcacctttactcatggccacgtgcacacacccacatttattcatttcatctgtgtcctatgcttggggctgggttattgcagtgcacaggattaactcaactctggctatcatattgctcaacttggaatacagaaattgaccaaagaattgcagagataaatacatgattgcagcctgggcgcggtggctcacgcctgtaatcccagcactttgggaggccaaggcaggtggatcatgaggtcaggagttgaagaccagcctggccaagatggtgaaataccatctctactaaaaatacaaaaaattagctgggtgtggtggtgggcgcctgtaatcccagctactcaggagggtgaggcagagaatcacttgaacccaggaggcggaggttgcagtgagtcaagatcgcgccattgcactccagcctgggcaacagagcaagactccgtctcaaaaaaacaaaaaacaaaaaaacaaacaaaaaaacatgattgcaaatggtgtaaatgctcagagaaaaagaatggggtggcctgggtaaccacagaaagggtgctcaggaagtgactttctggggaaacaacattcaggaggctctgacacccagtgaggggaaggagctaaaagtgggagtgggggtctgtcactgcattttatagaagcagatcctaagacatggatgtgaggatacgcagtttatttgggtattcctcccaggaaacaccggtagggaagtatggaactgagatgggaaaggcaagaattcaatacaacgtgcgtccatgggcaagtcaccaccctgagcttcatgtcctgggagaactcacagtcccattatggagcgaacctcttcgggatcccaagtgggacgctggcgtgcttactcaccagcttcccagccgtcactggttgggggctgctttgggagcactaactcactggyccctgttgtttgtcctcgggcagagtcctaggtgtttgaagtaaaacctacatgctgcaagcccagatcctagaggtttcatctcatgtgctaactcctatcagctgtagtggctggctgcgtggagttgctctttggagaaggtataagagacaggatctgattttagcaaggaagagagtgctgggatgtctcagtgatgtgtaccatggaactggttcctggttctccctatragtttatatatatatatattttttgagacggagtctcgctctgtcgcccaggctggagtgcagtgccgtgatctcggctcactgcaacctccacctccagggttcaagtgattctccagcctcagcctcccgagtagctgggattacagcccgccaccatgccatgcctggctaatttttctatttttagtagagataggatttcaccatgttggccaggctgatttcaaactcctaacctcaggtgatccgcccacctcggcctcccaaagtgctgggattacaggcttaagccaccacacccggcctccctatgagtattgaaagagatacaaaacagatattaaagaaaatgagggacattgargacatccagggaggggtctgatgcatggmaagcccaatgttggttctccagagtaagaatttcacaaaaaggacaattagacaaggcaaacctttggtttctgaagatatgaggtctcaagtgtccctggagggatacttccaatgtaaaggcaggctctccccaaaatactacttaccaccctctggcttcctcaatccccaatctcttcctttgctccttcactcctcagggccttctcttcccaactcccagccaccccctgaggtctrtgtgagcctgatcaaggcctgcggtggtcctggaaatttctgcccatccttcagcgagctgcagagaaatttcgtgaaacatcggccaactaagctgaagagcctcctgcgcctggtgaaacactggtaccagcaggtgagggggctgccaggatggcaggggcaaggagagggaagagggtgaggaggaaaggcagggcctgattttcatctcaggaagctgcagccaggggaaatggaagcaggtagagagggagagaatgctagtcttttgaaatgtaaagtgaaaccgtcagtgaagaaggtggaaaaggaggagaggaggaggaagaggagaaagaaacagagaaggaaggagaaaaataggtgctctacagtatttcagtaaactagttatttttattttattttattatttttttttgagacaggatcttgctttgttgcccaggctgtagtgcggtggtgcaatcaccactcactgtagcctccacctccctggatcaagacctccctgkctcaagtgatcctcccaccttagcctcctaagtaactgggactacaggcatgcacaaccatgcccagctaattttttttatttttcttttgtagagacagggtctcactatgttgaccagcctggtttcgaagtggtctcaagcgatcctcccaccttggcctcccaaagtgctgggattacaggcaygagccaccacacccaccccacatgttcttgttacccttcaattacagtctaggcctggcagatgtcagcttcgccgggtactgtggccattcgtcacagcaggttaaggactaacaaggggaaggatttctttaattccaccccaggagtcgaaaagagggcatgtgtgagtgtaaacagccctcagggacatttctcaggcagcagctcagtcagttttggaaacaaaatcttcctccgagataacggaaactccaactgcaaaacagaactcagagacaaaaatcatttattatatagaacttgcagagaagttacaagggaatcagacagcagaaggaaagatttgatccaataaaaataaaataggctgggcatgatggctcacgcctgtaatcccagcattttgggaggccgaggtgggcagatcatgagatcaggagatcgagaccatcctggctaacacagtgaaaccccatctctactaaaaatacaaaaaaatagccaggcgtggtggcgggygcctgtagtcccagctactcgggaggctgaggcaggagaatggtgtgaacccaggaggcggagcttgcagtgagccgagatcgcgccactgyactccagcctgggcaagagagcaagactctgtctcaaaaaataaaataaaatataacagggatttaaagaaaaaacaattaccggccaaatgtggtagctcacgcctgtaatttcagcactttaggaggctgaggtaggaggatcacttgagcccaagggttcaagaccagcctgagcaacatagtgaaaccccgtctctacaaaaaatacaaaaatacaaaaattagctgggggtggtgatgggttcctgtagtctcagctgctcaggaggctgaggaggaaggatcacttgagccccggaggtgaagtaagttgagctgggtattttttttatctattcactaaggcttacatcttacagattacaggcatcctacattttatatatcatctaagttttaagaatgtaayatttcactaatattgaagaaaataagttatattaccatgagtttaaatttctaacaaaattataatgttattagttatggtttacaaaattgagtgttaaggatgaatttgcaaaaagttacaaaacaaattaattaacttataatttttttttttttgagacagagtcttgctctgtcgcccaggctggaatgcagtggcgcaatctcagctcactgcaagctccgcctcccgggttcatgccattctcctgcctcaacctcccgagtagctgggactacaggtgcccgccaccatgcacagctaattttttatatttttagtagagacggggtttcaccgtgttagccaggatggtctcgatctcctgaccttgtgatccacctgccttggcctcccaaagtgctgggattacaggcgtgagccactgagcccagccttataaatacattttaattcaaaattgaatttctaaggtcaaggataaagtttttttgttagtaagtcagtgacctataggaaaggcccaaggtttcatttatttgggagatgagaattatacaagatgattctgtgtttgtttcaaggccaaagtgttatagcttttttttttctcctctgactttgggatgggagctaatattcatatatgatggccataggaaaatatgtcagttttacttccacaaatcaaactactgaatatttgaccaaaatttttcactttctggctaaatatcaatgtatcagtgaaattctttttttttttttttttttttctgagacaagttctcactcttgcccaggctggagtgcagtggcatgatcttggttcactgcaacctcctcctcctgggttcaagcgattctcccgcctcagcctcccaagtagctgggattacaggcacctgccaccacacctggctaatttttgtatttttagtagagacggggtttcaccatgttggccaagctggtctcgaactcctggcctcaagtgatccacccgcctcggcctcccaaggtgctgggattacgggcgggaggcactgcgcccggcctcagtgagattcttaacacaggaagtgaccactgtcagttaagatgcttccttttgcaagtaagagaaaaacacaaaaaccaactcaaactggcttaaacaataaagggaattatcagcttatgtaggaaaacccctaaacagtagggggggcgggcggggggggcgggtttcaggcactggtgagggcactggctctgtttctctggaattctctcagcttctcattcctctatatgtcagcttggtcctttggcttgtttccctcttggtggcaaaatggccacaactattcctgccctcatattcacacatgggaggacttctcttctttcaaccactgaacaaaagaactaggctttactctagttgagccaacttagatcgcatgccttctcttgaagcaatcacttgcaagggggaaaggtttatgctgataggactgtgccagtcagggcccatcctggagctgcgggtgggggtcaaccccttccaaacatcatggctactatgcaatggggaaggaaagaatgtctgctagagaggcaaccccaatcttcactacagaatctcacctattaccattttttccctctatctaaggaaacctttcctttcttttaagaaacatttctcagcagctcaatacattaaaatagatttaaatgggactgcttaggctagaatgtttgtgaccgagcgcaatctgctcatacctgttcataagttcattccaggagttacatctgttgagcatatattgaagcccaatggactaactcagccctttaattctaaaatggtgaaacctatgtctagagatggaatgtgacatggccaaggtcacacagccagtaggcagcagagccaggactagaacttggatttctcagcttctggtccaacgccatccttacacagaatcttagggtctctctctctctgtcttcccatctctttcaacagtatgtgaaagccaggtcccccagagccaatctgccccctctctatgctcttgaacttctaaccatctatgcctgggaaatgggtactgaagaagacgagaatttcatgttggacgaaggcttcaccactgtgatggacctgctcctggagtatgaagtcatctgtatctactggaccaagtactacacactccacaatgcaatcattgaggattgtgtcagaaaacagctcaaaaaagagaggtactggaccactgtttgcccaccaaatcttacagaaaaaaagagagacgggctagtgtaacgtggcatagagttttatggattggctgtattaagcagtaaggctgccaccatagttgagcatcgacctcccacaccaacacagctggcatctcaagttggtggcttatcaaagtcactggggggccatggggcgggtagaagcctgttccttgtttcctaagccaccctccaccttagcttggccttcttgctctctgaagaccattcagtgctttgtaggagctagcatgggaaaatggaaagaatcttggagactcaagtttaaatcccagctcagccattttcctactgctatgagcctcaatcccttatccataagacaggagtaaactggaacctacgayataggattgatgtaagggttggagaaaatctgtgttaaggatccacaatatctagcatctggcagatgctgagtaaatgcttatattggagcatgtgctgtcagcgtcccattcatatcctctcggcctttaccgttctagggaaggttggttccacttccagctgtcagcacctgcatccctttgccagcagacccactctgagaagagccctccaccagatctggtgggagttggtggataaataccacagctccctcacccaaaagatggaaggaatctgggtctcattgcgtaactttttttttttttttttaagacagagttttgctctgtcacccagggtggagtgcagtggcgcaatctccactcattgcaacctctgcctcctgggttcgagtgattcccctccctcaggcttctgagtagctgagattacaggcgcctacaacccacacccagctgatttttgtatttttgtagagacagtgctttgccatgttggccaggctggtctcaaactcctgacctcaggtgatgcgcctgccttggcctcccaaagtactgggcttacaggcgtgagccaccgcactgggccccattccatactctttcctaaagatcgcctccagtggaccacagtagtaattacttcaatacccactctttgttgtctgccttcccttatctgtctcactgtctcactcccttatttgtgcttcctgggatcactttccaaataagccaaatccttatctggggatctgcttcaggggaagcccaacccagacaactctctgtgttagaagctctgggcctgtgtaagcaacatcacagtatttagtgttctgttatgtagtattgggtctcttttgtaaggaagaaaagccaggtctgctcatgaaaagaggatttattataaccatggccagaaaaatcgagaaagcatcaggacctgagactccctctctctctctgtcactctctctcatgaactacagcacttttcccctcagcctctgcttctctctccacacctgtccggctcccctctgcctcccaggtataagggatctccatcatccccatgtccaaaccccagagagaaccagtctgattcctggtcacgggacacagaccccatgtgttgggtcacctgccagccaacagaatgagccactttagatcagtgaccccaccccataggacagcctggcactttcaggcaggactgttttagggagcagtcagggttgggaggagccagcctggagcccaaagtccagttcattccagtagcctgtgtcacattcgattacacagatgaagtcgcagctccctcccaagccctggagtacaaagggctgggttttttttgtttgtttttgggttttgtttttttttttttaatggagtcttgctctgtcacctaggctggagttcagtggcacgatcttggctcactgcaaccaccacctcctgggttcaagctatcctcccacctcagccacccaagtaactgggactacaggcgcctgccgccatgccctaatttttgtatttttagtagagacacggtttcaccatgttggccagcctggtcttgaactcctgacctcaagtgatctgcccacctcggccccacaaaatgctgggattataggcgtgagccactgcgccccrctcaaagagctggtgttaatcatggacttgcagtcaccccaagttaataagcaagcccaagatccccttcaagccaatattctttaaaatatttattcaatatttatagaaaggagagacttttgggggcagcccaacctctgctctgttgaggaggtagatgggtaagagcccccatctactggctgtaagaacttagggcaatctaggccgggcaccggtggctcatgcctgtaatcccagcactttgggaggccaaggcaggtggatcacgaggtcaggagttcaagaccagcctggccaagatggtgaaaccccatctctactaaaaatacaaaaattagctgggcgtggtggcgggtacctgtaatcccagctactcaggaggccgaggcagagaattggctgaacccgggaggtggaagttgcagtgagccgagattgcaccactgcccttcagcctgggcgacagagcgagactctgtctcaaaaaaaaaaaaaaaaaaaaaaaaggaacttagggaggtctgtaaaaaggggacaaccacaacaataaacaataaaaataacagtccctaccttatagaattgctgtaagattaaaataggttaatctgcataggatttggccttgtgcttcaataaatgtcagtagttggtggcagtggtgtttctactatccaaagtaattcagcagctctaaccttaaacttaaacttgcaaaacctgctccgaaggtacagggccccccctgcctgaaagggcatctgttattactccagcatgcctcttggggcctcattctccccctaaattccttgcaaacacttaaggcactatcccaaagaagaagaatttttttttttttgagacagtctcactcggtcacccaggctggagggtggtggcatgatcttggctcactgcaacctccacctcctgggttcaagcaatgctcctgcctcagccttctgagtaactgggatgacaggtgcgtaccaccacacctggctaattttttgtatttttagtagagacagggtttcaccacgttggccaggctggtcttgaactcctgacctcaagtgatcctcccgcctcagcctcccaaagtgctgggattacaggcgtgagccactgtgcctggsccagataggaattcttggaaatagcattgtctccatcctgttactctcctgcggtgttttggggccctcttgaacatccccgggatgtggatatcacaattctcagtggctggacgaaataattgccgagaaggtttttttctggcttgaaggccttcaaaccattatgagcctgggcacccttttcctgtgttacaggcccatcatcctggatccggccgaccccaccctcaacgtggcagaagggtacagatgggacatcgttgctcagagggcctcccagtgcctgaaacaggactgttgctatgacaacagggagawccccatctccagctggaacgtgaaggtaatggctcctctctgggctgtcaagggcttgaaggtcagaacgacagataaactactcagtatttactcattcagttctgtgttgatggagaacagaactttagagtcaccgtttaagggccagctgcaccacccatgggctccgtgaacttggacaaattctttggctctcagagccttgggtttcttaccttcaaattcttgttctcctttcctttctttttcccataatttactggagaatcagttctgtgttcctgatcattctttgcgtgagttgggtccagccaagtcagctcaatcagccattctgtgccagtgctgttctcagggatggggtaggggatgtgggctgggggacaacacaggcacagaaataagacatgaccacgacgctcggccaggtgcggtggttcacgcctgtaatcccagcactttgggaggccaagacaggtggatcacttgaggtcaggagttcaagaccagcccggccaacatggaaaaaacccatctctactaaaaaaatacaaaattaggcgggcgtggtggcaggtgcctataatccctgctactccggaggcagaggcaggtgaatcgcttgaacccgggagctgggggctgcagtgagctgagatcgtgccattgcactccagcctggacagcaagagggaaactctgcctcaaaaaaaaaarraaaaaagaaaaaaaaaagacaccaccctcactctcagagaactcaccctatgttgtcaggaagcaaatccatgaaacaaacttacacaaaactgctagaattaccagagaagacaagatactctgaaaacaaacaaacaaacaaaaaatactaagtcatattattatatgatgccaaacctatagtataggcagagatcacaaaaatctattttattaacatcacactttctagtgtgcaaagctcttgtccaaggtctgtctcagttgatcctcataagcaattctgtaaagtaagaaggtcgagtgttatcactatctttattattattatcatcattactattattgccattttacagaagagaaaactgaggctcagagaggttaattaactaagggcactctgctaagaggcagcagaaccaggggctctgggggtctggaagcagaataaatgttaactgaagtcaccagagaagattcctttaaaaagttaggagttgaaatgagccctaaaggccggggggagatatagacactcagaacagaggacaaaggatgatgaggggtaaaggatgggaggctgggatgagcaagatgtgtacaggacaggagactgaactgcttggagcagaaggcagaagcagaatcagaggctccagtaaggtacatagagtataaacggggggacccgctggccaaatgaggaggcccacccatgggctggaaaatatacgcctctggatttttcctgaatataaaagccattgtaggctgggggcagtggcgcacgcctgtaatcacagcactttgaggggctgaggcgggtggatcccttgagcccaacagttcaagaccagcctaggcaacatggtgaaaccccgtctctactaaaaatacaaaacttggccaggtgcggtggctcacatctgtaatcccagcactttgggaggccgaggtgggcagatcacgaggtcaagagatcgaaaccatcctggccaacatggtaaaacctcatctctactaaaaatacaaaaattagctgggtgtggtggcatgtgcctgtagtcccagctactagggaggctgaggcaggagaatcgcttgaacctgggaggcggaggttgcagtgagccaagatcgtgccactgcactctagcctggcaacagagtgagattccatctgaaaaaaaaaaaaaaaaaaaaagaacaaaacttagccagatgtggtggcacgcacctgtggtcccagctactcaggaaactgaggcgggaggatcgcttcagcttgggaggtcaaggcgcagtgagttaagattgcaccactgcactgcagcctgaggtgacagggcaaggccctgtctcaaaaaacaaaacaaacacacacaacattgtgcaaatattttttatcttggctagtcagaaaacttggcaatgccaggcttatatttctttttctttttctttttttgttttccttttgagacagagtctccctttgttgcccaggctggagtgcagtggtgcgatctcagctcactgcaacctccacctcctgtrttcaagagattctcccacttcagccttccgagtagctgggactacaggcatacgccaccacacccggctaatttttgcattttttggtagagataggttttgccatgttggccaggctggtctcaaactcctgacctcaagtgatctgcccgccttggcctcccaaagtgctgggaatacaggcgtgagccactgcacccagccaaggcttatatttcttctggaaagaatcagctagaggcctgaccctcgccagcattttccaggtgctctccagccacctggggctctcaggccctggagtgtagcctctggaggtggtgagaacacagactctggagtctgaccaacctcacttcacatatctgccctgctccttactacctatgtgattggtgttcagtaaattacctaaccctgctcagtttcctcatcaataacatgggggtaacagtagaaccaaccaactaatagagatgctctgagaataaaatgcattaagggtatggaaggtgctcagcatacagcctggaaagtgcttaccactccctaaacatttgctgctgccgctgctgctgctactattgtaaagataaggacagatgaagggaacatttgcacatcagacaaagaagtgtggacttaacacctctccttctccctctcccttccagagggcacgagacatccacttgacagtggagcagaggggttacccagatttcaacctcatcgtgaacccttatgagcccataaggaaggttaaagagaaaatccggaggaccaggggctactctggcctgcagcgtctgtccttccaggttcctggcagtgagaggcagcttctcagcagcaggtgctccttagccaaatatgggatcttctcccacactcacatctatctgctggagaccatcccctccgagatccaggtcttcgtgaagaatcctgatggtgggagctacgcctatgccatcaaccccaacagcttcatcctgggtctgaagcagcagattgaagaccagcaggggcttcctaaaaagcagcagcagctsgaattccaaggccaagtcctgcaggactggttgggtctggggatctatggcatccaagacagtgacactctcatcctctcraagaagaaaggagaggctctgtttccagccagttagttttctctgggagacttctctgtacatttctgccatgtactccagaactcatcctgtcaatcactctgtcccattgtctactgggaaggtcccaggtcttcaccagttttacaatgagttatcccaggccagacgtggtagctcacacctgtaatcccagaactttgggaggccgaggtgggaggagcgcttgagccgaggagttcaagaccagcctgggtatcayagggagaccccgtctctacaaaataaaaaaataattcactgggtgtggttgtgcacatttgtagtctcaggcactcaagaagctgaggcagaagaatcacttgagcccaggaggctgaagctgcagtgagctgtgatcacactgctacactcctgcccaggccacagagcaagaccctgtgtctaaaaactaaaacataaaaataagtaaatccgtttaaaaaaaggattatcccagccctgccagggggaggatgaggaggggtgtgaggactaaatatacaaataaatagtgtggtcacatgacgcacagcaacagaattcggacccacagccttctgcagcaatcaaccccaaaccatcaggacttgggcgataactggcagcatctctaactccccaccctactcccatcctgcttcctatttatgaccaacccaagaaacccaaataagctccccagaccaatcacatggttagccccacttctggtgagtgcacttccagcttccccataccaacagcctcaatcacggcatccctgaagccttcccattttcctgcctgtctttaaatctctgtcaaaagcgagagatgggtggctggttcctttgctatagcaagttgggaataaatcgcctttgttagttctcatttgggggctgtttatttccacagggcctaatgctgtcctaatggttattgcttgatcatttgagcttctcaactctaagaaatgaggactggggaaactgaggcaaaaagagacaaagaatgggagattgaggatgatgcagtgtaaaaaaaaatcacctcaactcctaaaacccatacacaaacagtacataatagtcaggaaactgtaggaaagtaatagcatctttattatcaaaggacgtcatgtgatcaggtttactccaagcaataaaaagtttccttttgcccccctgttttgcctagttttctggtgggctactctcctaccatagcatagaaaatgcacactgcaattggttatcaacagcctctggtcaatttagcaatcataatctgtgtatctcccacctctgtttgccttcagggacagaaaaagtgcctcctttccaggaggtagacaggctgttccagtccccatctttgtgtccttcataatgcccagcacagcccacattgtaggtggtgggaaaattcttgtttaaaataaaaaaaagaatgaaaaatgcaatgtcttagtccatctgggctgctaaaacaaaataccatacactggatggctcatgaacaataaccatttatttcttacagctctggaggctgggaagtccaagtcaagacactggcagatttggtgtctggtgaggacctcttcctgattcacagatggcagcttctcactaagtcttcacatggtagaagaggcaaaggtgtctctaggatcgcttctttttttttttttttttttttttgagatggagtctcgctctgtcacccaggctagagtgcattggcatgatctcagctccctgcaacctctgcctccgaggttcaagcgattctcctgcctcagcctcccgagtagctgggactacaggcacctaccactgtgcccagctaattttttttttatttttagtagagacggggtttcaccatcttggccaggctagtctcgaactcctgaccttgtgatccacctgtcttggcctcccacagtgctgggattacagttgtgagccaccatgcctggcctctggggtctcttttatgaaggcattgatccagttcatgagggctcaggacccattatgtaattgaaagattctccgtggggcctgaaagcttaagagaatgaatgacccctccctcccctccctccttgggcccggtcccaaggcgcaaggccactcgcgccagcagcatgtgtcagcaagatagcagaagcgggaagagagcgggccagaagacacctaccccctgaagaccgagagagacgtcatccgggtacaatgtagcggttacaacagactgagaaacttcctgtttacaggagactacaaaacccctgccccgtcctcatttggtgctgacgccattttaagcctcagcccacctgcacacacactgcctcatgttgtctgttggccacgctcttggggttcgaaccaacacaagaccctttcactaattacttcccagaggtcccacctcctaataccatcaccttgggagtaaggactttttggaaattatcagtatcaaaatggagtcacttatgtcaaaccctaacaaatgcctgtcacaaaaattatctcaagaagttcctaaaatccgcagtattatagataaaccacttgcataagaatatttgcctaacagtgggtgtctccacaataagctaaagccaactcctgcaacaggctcctgtgatcaacggtacttgttttaaagaagcttatgtggactttgtcttttctcgttgccacaacctcttttaatgtgcctatagtccactatagcatgcatatctcaaattgcaattccttgcaattctggaataaacgctttattttggagagtcagtctctctgttatttattttacggtgtcaattttaacatatgaattttggaggaacacattcagaccatatcagtcaccttcctcttctttgaaatagaaaaagctcaaggccagagagtttattttagtaaagttttgacatacctgtcttcaaagataaaacatgaaacagcattccacacacaaaagtaaagtgattttgttcatccttcactgtgaggtattttaaccacagagattctaattttttggtcttggatgggtcctgggagtcagtattgcctggctaatttttgtatttttagtagagatggggtttcaccatgttggtcaggctagtctcgaactcctgacctcatgatctgcccgcctcggcctcacaaagtgttgggattacagatgtgagccaccgtgcccggacaggattctgcatttctcttttttttttttcgagacagagtctcagtctgttgcccaggctggagtgcagtggcacgatcttggctcacctcaacctccacctcccaggttcaagtgattttcctgcctcagcctcctgagtagctgggactacaggtgcgtgccaccatgcccagctaatttttgtatttttagtagagatggggtttcactatgttggccaggctggtctcgaactcctgaccttgtgatctgcctgcctcagccccccaaagtgttgggattacaggcgtgagccaccgtgcccagcctggattctgcatttctaacgagctcccaggtgttaccaatgctgctggctcatggactacactcttaagtagtaaggccctaggctattaaaggaaatacagattcctggattccacctatcagagattctgattctgttagtattttctgtgagacccaaaagtctgcagtttaaccagctctctaaggtgtttcttaggcccaactggactgggaaattactagaataaatgacatggaatcaaaacctgggaactaatcctgggtctgtcattaactccttaggagattcccatcccctctggagatctgtcatcaagaaatgattggagaagttaatctcttaggcccttctagctcttgcctttgagaaccgcccacctccccattcccacctggtatccccaacccagtacagttcatggccaatggcggtccaagtcttggaactacaatccccacaatgcctcgcgcctctcctctcwcgtgacgtcatgaaggaggcttgataacggcggtgttctccacaatcctttgcggtggttcaagatggcggcgcccagtggcacwgtgagcgattcggaaagtagtaacagcagtagcgatgcggaggagctggagcggtgccgcgaggcggcaatgccggcttggggcttggagcaacgcccgcacgtggcarggaagccaagagccggtagggtactatgtttggggagactggctgaggggcgtgggatcttcccctggagcctgagaggatggatggtgaggagagagtcactgggactcggcttccttccccgagagacctccagggactgggtgtagtgcagattgaaagcatgggcaggtgcagtagggagggtatttcattattccagtcggggaagctgaggtacccaaatgtcttttgattctgcctccttgggtctatcctcactgccccacactgggaaggctgccgtctcttcgagataactgcaacagccccctcccggtattctcgcacccagcctttccccacctccaacacattctcccaccctggaggttgttgccaagagcagtgcccagcacatcactctgaccgtgactccctagtgccctgggaataaatacagagccccgcaacatcaaggggcctaatcatggatagaacccaagggttcttgaatttggaatgaaaacatgttgcatctttgctttctattcatctctgactgaattttagcatctctttccgtcttgcaagcactaagccacagtagttctggcaatgccgttactttatcccaacagaagtcacagattttcatatctcattacaatctttgcagatacagatatcaatatatcattttattgataaaaagatattggggaaaaaagtcatttacactcatccctgatttaaaatgtgccactctaatttttagacccatctctatatctaagatgtaagaagcacatacatcacaagtttggttgtttactatcatgataattaaatttcggtatcattggttttctttgtaatcctgtatgttgcatttcatgcatttaaaacattgctctgagaagagaaccgggcttcaccaggctgttagagaaggctatggcaaagcaaggttaagaaccgctggatttgtttaaaaggacttacaagccctttggtgatccattgccttcctctcccttccttccctcctgccatactgcacttcctgtaggtagcttccagaccatagtctgcccctctcaccccctagtaccataaccacagttttctctgcaagttctatttacagatctgcctttccatctcattagcggtgggaacttgagcaaagtacttaaatctcactgtacctaaatttcctcatctgtacagtgcgggtagtgatagtacccaccccataaggttgagaagtaactgagataatgcaatctacagtgcttggcacatcttaaaggcccaatacatggtggcaaatatgtggttggtctttccacatggactgctttcctcctcctgcctaattctcgctcttttttttttcaaaactaggactcagtctgttaccgaggctgacacaatcatggctcactgcaacctcgacctccccctactcagatgatcctcccacctcagcctcccaagtagctgagactacagatgtatagtcccagctactttttgtattttttgtagagatggggttttgccatgttgcccaggctggtctcgaactcctgggctcaagtgatcctcccttctcaaccttcaaagtgctgagattacaggtgtgagccactgtgctcggcttctagttttttttgtttgtttgtttgttttttggggttttttttttttttgcatttttttttttttgagatggagtttcactcttgttgcccaggctgcagtgcaatggcacgatctcagctcactgcaacctctgcctcctgggttcaagtgattctcctgcctcagcctccctagtagctgggattacaggcgcctgccaccacgcccagctaattttttgtatttttagtacagacagggtttcaccgtgttggccaggctggtctcaaactccagacctcaggcaatccacctgcctcggccttccaaagtgctgggattacaggtgtgagccaccgcgcctggtctctttttttctttttgagacgcagtctcgctctgttaccaaggctggagtgcaat

SEQ ID NO: 95333 - DNA, 90168 bp, Homo sapiens
gagaaacatgggaagtcaggacacagcttggggaagaccagcttttatcaaatcagtatgagaggccaggagactgcagtgagaaagcacggttatgaagcaggaagggaactagagaagacagaggagcttcaactgagaagcagggatgtgttctgcagtaagtgatgtcggctcctcctccggactccagggccctgtggactggtccctgctggctcaccaaccaccctgccgtctctcctggttcttgctgtgggtcctccagccaccccggcctcctgacccctcttccaacctcccttgccctcccgcctcacggtccttgctgtccctcatgcccattctggttcttttctacccaccgtccctcaccaccaccaactacttcacttccattcttcaaaaacttttttttcttttcttttttttttgagatggagtcttgctctgtcacccaggctggagtgcagtggtgcgatctcggctcactgcaaactccgcctcccgggtttaagcaattctcctgtctcagcctcccaagtagctgcgattacaggtgtgtgccatcacatctggctaatttttgtatttttagtagagacggggtttcaccatgttgcccaggctggtctcaaactcctgacctcaggtgatccacccgtcttggcctccgaaagtgctgggattacaggtgtgagccaccgtgcacagccaactttgattcttaaacttaatccattcatctttcaatatttaaatgtcagtgctgctaggtgcttcacacctttactgatcactgtaggagtcagttatccccacaggcccaggtcaggtccctgtcacatgttttcatagtactgcatatttctccttcatagcacagaaaagggttgaataaatcatttctggctggtcgcagtggctcatgcctgtaatcccagcattttgggaggccaaggcaggcagattacctgaggtcaggtgtttgagaacagcctggccaacatggtgaaaccctgtctctactcaaaatacaaaaattagcttggcattgtggcgggcagattcccaaatgtgcgcctatagtcccaactatatgggaggctgaggcaggagaatcgcttcaacatgggaggcagaggttgcagtgagccgagatcgtgtcattacaatccagcctgggtaatagagagagactcagtctcaaaaaaaaaaaaagaaaaagaataaatcatttcctgtacactagtcataatgtagcttcttgtaggtaaggtctacgaggacagaagtccattttgtctagatcggggtcagcaaacttgctctgaaaagtaccagatagcaaatatttttgggtttgtggcccatcaaggcttagttgcaactattcaagttggtcattgtagccccaaagcagcaagacagtaagtaaataattgggtgtgactgtttcagtaactctttatttacaaaagcaggaggcgggcaaaaaggccacagtttgcccacccctggtctaggcaccagcacccagtctagcacctggcatatagcaggcactctatgaataaagaaaactaccaagaaaaggccatttgactttggctattagatggaaactggtaccaggggaaggtggttttagtggcatggcagggaggagctgagatgacggagggctgaagagtgagcagcagttgcggaagtggtaacttctctttcaggagttccaccatctgagcagtaggttggggaatgggtgctcttgtggtggagtggggtggattcggaacctgtgtgcaggctatgacaagatgatagggctgaggaagaaacagggtaactcatgaagaggtggggctccagagctcaggggcatgtttggggttggtcacaaaggaggaagccaccttctaaaactgaggaaaaagaaacaaaaaaaggcagaagaaagaaaatgaggagaaagccttgtatgctattttccctgtgaaaatgtgagccaaatctcctggtgcagagagtggactagaggcagctcaggagccacaggcatctggcagattgggagctactggcaaaaagggaacagtggacactcaggatggggcktgcctcaccaagatgcatgaagctacacccttcacttttctctcttcttatttgagagagcacttctagccaaggtggtgtctgggtgtcttgtggattttaggttttcagctctgactcagtgtgaagtgtatcactcactgaatcaccagcagtacttgctgtcacttcccaacacttcactttcccatgcaggtagggacaggcaggccctgagaaggatggggtcatgttttacatgtgtcatacccagctctttcttaaaggacacggaaaagcattttaattgcagaaacttattggtgaatttcatccccatgccttcaaatgtgtaggagacccacagggtttaaaaaagcagataggcggccaggcgtggtggctcacgcctgtaatctcagcactttgggaggccaaggcaggcggatcacgaggtcaggagagagagaccatcctggctaatacatgaaaccccgtctctactaaaaatacaaaaaaaaattagccaggcatggtggtgggtgcctgtagtcccagctactccggaggctgaggcaggagaatggcgtgaacccaggaggcggagcttgcagtgagccaagatcgcgccactgcactccagcctgggcaacagagcgagactccacctcaaaaaaaaaaaaaaaaaaaaaaaaaaaaaaaaaagaaaaccagccggagtaacatggtgcaactctatctctactaaaaaatacaaaatttagccaggtgtgatagtgtgcatctgtgatctcagctacctgaggtggaaggatgacttgagcccaggagattgaggctgcagtgagccatgattgtgccactgcactccagcctgggtgaaaaaaaaaaaaaaaaagcagacaaaaaatattgaacacataggcgaggtgtggcagctcatgcctgtaaccccagcactttgagaggttgaggtgggcagatcacctgaggtcaggagttcgagaccagcatggcaaacacggtgagaccttgtctctactaaaaatacaaaattagctgggcatggtggtgggcgcccataattccagctactcaggaggctgaggcaggagaatcgcttgaacccgggaggcagaggttgcagtgagccaagattgcgccattgcaccgcagcctgggcaaaaagagcgaaactctgtctcaaaaaaatccataaataacctctgacagcaggagctcataatttctcaggggacaatcttatggcagtttctctcctgggctgtaaaatatttctctattagtcaaagaatgatctgcatggagcacaaaggccaattttatcctaatgatggataacatagattttttctttaaatgctggaaaccatttgagggtttgatgattaaaactagagcacagcacctatttagttttataaggttaacataatattaaagcctataaaacacaacttcttatgtagtcaaaggattagtattgcaaaatgaaaagttttcttatagcgtcaaaaacatatgaacaatcaactttacttatccatagaaccagagaactgaaaaaaccttccatttcaatatgaatttattaatttattattactaccagtacaggaatgtgtaaggcttcagatctcaacctactactttcaggaaggacaaaaaccatttaaatgtcttttacttgatatgcctgaaagaatagcaccaggatctattttcatctgccttatttcaaggtgtaattgctgttgatatttatagaccgaagcttctgtgtctgttctaataattagtagaactccaattcatatttgcattttgaagttctcacccccaacaagtccgaagataattttcctaaaatacacagatcctcactggactctttcaagtccttccagagatgatgcgaaccagcgactcagaattcaatgactacaaagcgcagggcctacacctgtaacacactatgtatttggaaggattttcaatgcacctttagatgtgtatcaaataaaagtctcttaccctattgttgggttgatgtttggatcaaaactgtcttccacaaaccgccacacaatactcgatttacctacacctgtatcctgaaagagaacgagatgagggactgagaaaaagttyaccttttggcagacaccaaaaactactttgtggcataagttcaggattttagaaaaatcaccctagacgtgtaaattttataaacggaggaacacaaaagcggttgtcataaaaattcagtagagtaattaggaaattccaactgtactaaaagggagaggtttttgccgttaagacagattaggaccttttgagagacccaaagtttctgcttcgtgtaaaaagtaacaagtccacttgctttttaacatatgttagtaaactttgaactcctgagttacctctgagtaatccctgatgaatcctagccccaccctatttgggggaataaagattagttattggagttcctgccgatctttaaggcagaaactctggaatgacagcatcaatttcagaaagaaggctttgaaatggccaacaccttgtctttcctgacaagacaggaagctgaagcttcaaactagtctttggggcttcctgatttgaacaccccttttctccacaggaagagttacttggcaaagtaactctttggacaagtggcaggggtatcccacaagttcaaaaacacccaagagacaaagtaggctaatgctgcttgtaaaacctaaagacctgttattggttttactttggaagacttggccaactcccaactaataccttggtaagttgggagaaaactatttaagaacctctcttaacccagatgcaatagagaggcaagggggggctgtttgctctttgtggggcgggaagagtccacgggctccagggaggggaaggggaagggtcccttcggcctccaggaccttttcgagagtgcaagaggtgggcgggacggctcccgagctggagggagggtccacggggctggcagacagcgtcttggacgtgggaggggggaagggatgaggggacaggggggatccggggtccccgccagcccagcctcccgtggccctcccggccggacccgccgccactcaccccgagcagacacactttgagctccctcagcgccatggcccgggagccaggggcgcgggcccgccgccgccctaagttgagaagggagaggccaggcccagcaagagcatcccctggcgccgctgccgccgcacggcccagccccggtccgcgcagaggcggctgccgcccgtcctccggccgtaggtccggcctgtccgctgccagccgcgtggggcccgccttagcagccgggacgccgccgcggccttccgggagccgccgccgccgccatcttgggacgccggccgcgtcacctgacctccccgcccacctcggcagccaccttcgctgagagggcggggccggccggccggcgcggatcgggggcggggcccgaagccgacggccccgcccctgtctgcagggccccgcccctgtctgcagggccccgcccctgtctgcagggccccgcccctgtctgcagggccccgcccctgtctgcagggccccgcccctgtctgcagggccccgcccctgtctgcagggccccgcccctgtctgcagggccccgcccctgccggtcccgcctccatgcccatcccaagatggcgggtgagtggggctgggctcgggggatgccaggggtgcccctctctctctcgccccgtgaccaccccgcgaggccgaggggcccctgcccgaccccgtcccctctcgccgcagccccctggtaacttcttgtgtgtttcttggttttcagagatccccctgtactttgtggacttgcaggatgacttagacgactgtaagtaagagttggggcacccctgtccctccctgggaccctctcaaagaattcagagtgcacgaagcgcggggcgggggaacctcaagccaggcmctccttgtcgggaccagaacagcgggacccccaactgcctagatccactggtggcggtccctcctccctgggcggggcgggctgagggtgggagcccttcccttccctcgggggaaggatttttgttgttggggaaactttggactccctgtcacttcttttcttcctgcgcctgcagctgccgtgggatgggcggarggggtagtcccaagtcctagtcgaccctgggcgggcggggggtccgccacctgggaggtgggtgacttccctctcagggccttgcccttttcctagggactttttaggactgctggggggtttgggaggtccccctctcggtgtggccggycacggagttgcacggacttctcaagtgtcctggccacaagcccggctccatctcttatcccatggagcccattggcccccgcatttcttgggtgggacccttgtcccttcttgccctcttttttggaatcatgttaagggctggtagctgggggaggtgtcatcttagaaatccaagttcgcatttctggtgaaggaaggaagcgttttctctcctgtcaagaaacttactgagcagctatttgctctgggggccacgtgttgggctccgaacctgcaaggatgtgttgaaaacagctctacacgcagggagctcacagggtgtggggagagcctacttgtaaacagaaaattaccgagcaccggagtgcttgctggtgaagaagccctatataaatcatccaaatagctaacattaattgggggcgtactgtacgccagtcatatacagtacttcctctcatctttcattccacatcttcaggtttcctaatagtaagagttggtgtttactgaaaacttaccatggaccagacagcgttaaactctttttttttttttttttttttttttgagacgtagtcttgctctgtagcccaggctggagtacagtggcacgatctcggctcactgcaagctccacctcctgggttcacgccattttcctgcctcagcctcccaagtagctgggactataggcgcccgccaccactcccggctaattttttgtatttttagtagagaaggggtttcactctgttagccaggatggtctcgatctcctgacctcgtgatccgcccacctcggcctcccaaagtgttgggattactggcgtgagccaccacgcccggcccagtcttaaactctttacacacattaactcagaaggcgcagtttcggctgggtgcggtggctcaggcctgtaatccccgcactttgggaggcagagacgggcagatcacttgagtccagcctggccaacatggtgaaaccctgtctctactaaaaatacaaaaattagccgggcttggtggcgcgcgtctctaatcttagctgcccgggaggctgaggcaggagaattgcttgaacctgggaggcagaggttgcagtgaacgccactgcactccagcctgggcgacagagtgactccgtctcaaaaaaacaaaacaaaacaaaacaaaccaacaaggggcagttttgttaaagtagcataacacttttgaaggggtaaagcaagctgatagttaagagcccggtgtctgtggaatcagatggccaagagtgaaatcccgtatcactgtttactgtcagtgtgatcccaggcaagtcgctgtaccactctrtgcctcagcgacctcatcagtaaaatgggcattatagtggcccacctcaaaaggcttttataagggattaaatgaataaaggatttagcacaatgcctagtatgtaataaacagttggtaaataatggctgctgttaccgttattcatgtgatcattattagtagttatttaacactgttgagcctggtacagtatagatccaggtttacccagctgaatgtttcagccgatgggcatgctcagattgaaggagttgtrtcatttccgttgatacaacggataaacaatgtttagttgccatgatggtgcttgtcattcatagatgtggtatttggtctgactggaaagctattttctagctgcttcagttatctaaccaccccaaaactcaatggcttaaaccaacagcatttgatttcccacaaatctgtgagtagactgggtggtgcttctgcttaatgtggtttcagttggggaagtccgaaatgatgtcacttatgtgggtggcataggtcctggctgttggccaggacttcagttctccgcgaggtgccctttccacttggctaggtcagccttctcacagtatagtggccacagggtagttgcacctcttttctgacggctcccctccttcagtcctttttcacctatgtatgtacaaaaaaggaagtaaggaattatataggaaaaaattatgatcttactttggacaaatatttgaacaaatgttaggtgtttgagacttgtgattataaagacttaagtactcttcagcagacagctgaagacttgccccaatgaggaaggaaaccaccgttatggctctgaacttaaccacaccttgggtaggacaaccytggcagcctcttgggggcttcctgtttgggcaagggtaggagctgtggagtgctgtaccttaggagtttataacataattgatctgtacgggagggcatgctcwttcgtgtcgccctgcttctacccctacacctccccatggtagtattgggaggtattwtcataccattattggcagaaagaaccctgaagttttatcctctacatcctggctctctcacacctgtagctgtgttacgttgggtggaccactcatccattctgttcaattctttggaaaatggcatgagaatgggagctgcttcataggactggtgtgagggttagatggatagccagaaaacattctagtctagtgctttgtaaagtattcagtgattttatcatcatcatcatctttgctggatttttatgtaagagcttatgattcaatgttaacagctgctactctgtgaggtaggtgggattattcctcttaacagatgagaaaactgagaatcaggttgagtaacttatccattgtggcacagctcatgaatggtggaattcacagtcaaatgcggttccttctgctcttttcttctttttttgagacagaatctcactctgtcgcccaggctggagtgcagtggcgtgatcttggctcactgcaagctccgccacctgggttcacgccatactcctgcctcagcctcccgagtagctgggactacaggcgcccgccaacacgcctgactaattttttgtatttttagtagagacggcgtttcaccatgttggccaggatggtctcgatctcctgacctcgtgatctgcccgcctcggcctcccaaagtgctgggattacaggtgtgagccaccgcgcctggtctgctcttttctttttattccaccacatggatcaatctcataaatattcttaacctaggggataggagatggatgtcagtttgggtggtactgtgactgttgtcctcctggggcatttgtgtctaaatgatgcgatgcctatttagactgtaggtcccttggggtagggacacaggccatcctttctataatccaatgtctcgcatkatctaggtgctcaattaatgttgttaatgttaaygataacgaattatgaggcttttgtytgatttactttgtgattcttgattatgtttggctaatttcaaaagggagccataatgaatggatgtcttrttttttaaatcattcagagtcttcaggccattgcagcacagaagagatttcatttcagagaattggcttgctgaagcaatctaaatttcttctcttgaaagcggaaagtgtgtgggatggcctkacatattggtttccatgttgaattacacatggaaggtggagctgtatgtctatgcctaagcagctgcaggcctatgaatgtctagttttgcttatagcatatggaggctgaagaggtgttattgttgataaggtttgcttggccaattagaatttaaatgtgtgtcagggatgggtgagtaaaaaatgaggggcgcctattgcaaatgtaaagagagctggtgaataaaaaatgaggggagcctattgcaaatgtaaagagacctaagagacctatcaacataagacaatatgtggtcatatttggatctttagttgaacaaatcaactataaaaatacattattgagacagggaaaattgagttggactgggtattagataatattaataattattttgttgggtgtgataatagtgtcatggttttgttcaaaggaaaagggcctcatctaacagaaacaagcattcgtgggtgaaatcatttgatgtgtgaagtccgctgtcaaatactgcaacaaacagtaaataaaaggtcaggagagggatagatggaaagataaatggcagaatgttgatacttgttgaagttggttactggggactagtctctatttttgtatatgtttgaaaatttccatagtaaaaggtttaaaggagtgagatgaaagtgtcacatgatcaaacatctataggaagagttggaaggctggattccaattctgaagtcactgcggagttcttgtaagatmcatttagcttcaaaagactgactcataaaatacgttagtgtttggggggcagtgtatttcttttcaaatatttagcttgcaagagctatctgtgaaagagcttggaagacgatatacttctatttrtgggaaaagccaggttctaacaaatgatatctggacctttggtgaaaacgggattagctaagccaatggaatatagagaraatcttggaatcttaatgctagaaggagcaatatatgttcaacctggaataaaagacattttccagagcaaaaagcattccatgtyatctgcccactttgttctatgtttgtaaaaatctcctcaaggacaacaaccaagcccccaaagcagaggaacgatattaatctgagtcctaaaccaaaccattgaactttctctctgaactatgatatacgcttgaatcaatcctaaaccaaaccattgaactttttctctgaactatgatatatacttgaaccaaagattttcagttttttaaaataaaaatctccctgtcaactgaaataatttgaacagcaatatctaatacttggaaaatggaacaaaacccagagatcaaagtattctctragtcagagattggcagtttttttctggaaaggatcakatattttagggcttgctggctagaaggtctctggtctgctattgtagcctgaaagcagccataaatagcacataaatgagtaggcatgggtgtgtcctaataaaactttatttacaaatacaagtggtgggctgaatttggcctagggaaggtggtttgctgactccttctctagctcagagttgattttattccattagagcccctaggtctgtggattagttgagccagccggatcagtatctttcccactaggtttagttagaagagctgagctttgttgaaaaacctctgttgaataacccttgagaagctgctcaagcttcatgtctcatttttcccatttgtgtrtgagaatggcaaggaacaaaagagtcagagtggtggaagcggatccaccttgcttcccttsccgttgttgtaatgcattctactttagttgctctgtattttctatttcctgtgaggcaaacagatgaacatcagcaattcccacaagttgtctctgtttaaaaagaagagttttaaatggctttcttcatcacaaaataagctcttgtaaacaaattttgcaacaaaacctagctaacaaaagggaaagtagttttgaccttgaaaataccaaatagtttaaccctgatgggaaaaaaataagaggtgagggcaggtattagtttccatgcttggaaagtcattcatgcacataaygtgtttctccacgtcttccaaggtatcagccttcccaaaagcgttggggatagagttgtggggaagcctggggctcaactcctgacacccacagcctggcagggaagtgcctgcagtgtctcaagggcccaggcagaagagggaacacagatctgggcctgtaagaagacagggccgggctgggtgcggtggctcacgcctgtaatctcagcaccttgggaggccaaggtgggcagatcacctggggtcaagagtttgagactagcctggccaacatggtgaaaccccgtctccactaaaaatacaaaaattagccaagtgtggtggcgtgcacttgtaatcccagctactagggaggctgaggtgggaagattgcttgaaactgggagatggaggctgcagtgagccaagattgtgccactgcactccagcctgggcaacagagcaagactctgtttcaaaaaaaaaaaaaaaaaaagaagacagggcaggggtaggaggggaaggcttctgaggggaggtggcatttgagttggggcaggcggaggaaggcgatgggcatttgggcggtgtgtacacaggcagagtgttgcatgatcctggtctgcttgggagccagtgagaaagaagagtggagacttgggaacaagggctgtgtgtgagggagggagtgggagaggctgggagatagcactgggggctgtcagtgaagaatctgctttaccagyccagggtttaggcttaacctgggaggcagtagggcgtccctaagcaytgtggtcgggtttctgtcttaggaatgcaacccaagcagtggtacaaacactgctgcttacttaggactaagagcatgtcaagctctgctgtgacacattattgttgtaacaaaagcccacgggctgggtgtttttaatcccattttattattgcaagtctcacagcgggcacagaaaggctaagtaacttgcccaaagtaacacagctagtaagtgacgggtggaatttaaaccaggaagtcaggctgcagaatttatcttaaccactatcctttggaggactcgtcattcactgttatattcattcattcattcaactgatatttattaagggcctattaagtctcaggcactatgttaggcattgtggacacagaagtgaataaaacgaacccagtttttgcttatatgaagctttcagttcagcagcagaaacaagacactaaagaggtaagcagaaggrcatatagcaggtgagtgtgactgaaggtgccagcacagtgtggttgcatgcatacaggtgctgctaacgtcaagtggccagagaaggcatctcyggagccctgagaggtgcttctgagttgagatttgagtaacacgctggagatactcgcatgaagagccagagaaagcctcctgcatacagctcttccttgtcaaggactagcaggaaggcctgtgtgtctggaacagtgaataacagacacaggaggtgagaggaggaggtgggggccaggccatacatagcccttaagtccattgtaaggtaaagtgttggccttttatccatggagtcatgggaaccactggagaatctgaaccagggagtgactagagctgctctgtgctttaaagaaaggaaagactggtggaggaaaagctggggtggggtccccagtgtgttcccgtggttcaggcgaggggagtggggtctcaatcaaggagatgagcccgggagtggggaatagggttgacagatagttccagtggtgagggaagggtcaactcagagacagggtctcgtggagaacttttctgacacctccattcccttctacccagactgggctagacactccttctttgtgtttcctgagccctgtattttcctgtggcagcatttgctaatttactaatagcattgaccattagaatgggtcttatccttctttgggtccctgtggtctaacatagtgaatggcactggacagcacatgagaagcaatgacacagatcctggtggcattgttgaggacaccagaaagcccccttgtagggttctggagcacagttaggactggagaggagatgtgaaagtcattagtggtgagtggtagctggagcaggatgagagggagcaggatgagagggaatgttggagaagaaggcgaaggggtacaccctgggcagcagaggcttctagaaattagccatggagttaagaaaccaggagacccttggagccagggttttgattggataatcatttatttatgtcacttgccccggaagggtcaggtaagatgaggattgaagacaggccatggagtttggcagttagggcgtcttcactcacctcagtgagtagttcagcacagccaagaagtggaagccagattggagttaattgagaaggttttggaagttgaggcagtgtggtctggaatccagtagctcagtggtcaaagtgtcccatgcctggtagccaaggcgaagaatacagcaggctgtggctaggcactgggcactttgaggaatggtcactgcgtttgggactcacagcccagcaggagaaagcacagcctttcaagaagcagctggagggcttcaagaggcttttcgtcagggatggaagattccagcacagatttgcatgatttatatgtactctgaaaaccttaaaaaaagaatttgaataacccaccaattctcctggttatatgcccaacaaaacatagacatatattctcaaaaaacatgttcatagtcgcatgattctctttttttgagttggagtcttgctttgtctccaggctggagtgcagtggcgtgatcttggctcactgcaacctctgcctcctgggtttaagcgattctcctgcctcagcctcctgagtagctgggactacaggcgcgccaccaggtccagctaatttttgtacttttagtacagtcggggtttccatgttggccaggatggtctcgatctcttgacctcatgatctgcctgcctcggcctcccaaagtgctgggatttcaggcgtgagccaccgtgccrggccagttgcatgattcttaagagttggaaactgcaatctactcaaatatttatcatgactacaaaggattataaattctggtatgttcacacaatggraaaccatgcagctgtaagaatgaatgatctatagctctaatcagtaatatggataatttcacaaacatctgaaaagccagacacaaaagggtacacactacatggttctatttgtacaaactataaaacratgcaaagcgaatctaggctgtcagaaggcaggagagttgttacccattgcgggaggtggtaagtggaatggagcaagaggtggttttggagatgctggtaaagttaccttgcttggtctgagagcattgcttgattgttttagctattttgaacagtacgaaaatagaggaccctataccccaatactcatcccaaagattttgactgtcttctacaaccatttttttcttttgcatctacctcaagtctgactagagaactcattgcatttttaagtaatattgttccattcattcattcattaacgccgtgtagactttaccaccctcatcttcttcaactccctccctcaagtgggcgagttggcaggagaatggagattggtaacattaaaatggagcatatgaactgctttgagctgcagagttctttcctatcaggtaacctgtttcccattgactgtcaacttaaaagtcagagtcggcggggcatggtggctcacgcctgtaattccagcactttgggaggccaaggcaggtggttcacctgaggtcaggagtttgtgaccagcctggccaacatggttaaaccctgtctctactaaaattacaaaaaaaaaaaaaaaaaaaaaaaaattagccgggcatgctggcacatgcctgtaatcccagctactcaggaggctgaggcaggagagtcgcttgaacctgggaggtggaggttgcagtgagccaagatcacgccattgcactccagcctgggcaacaagagtgaaactccatctcaaaataaaagtaaataaaagagtcataaataatgatgggttttggaagccatgattaaagccacaaatcaaagaggaatttccatgtctgcatggcatagaaaggatggctgctcatgaattaggctggtctttccagccagcccattgcatagtgctagtaataactatcagtagccctcaaagatttgcaatataaaacattatgcattggatggatctgctcatatgagagctaataaatcagtgtgggtcttgttagagaatgacgtttatatagagaaagtttgcttgcacaacttgccgtttgaatttagttaagttaacaaggacctgaggtgtgcgggggtcacttcccaccaaaagctgttgaagaatcaagaatgttctttatttgttagatggatcaagcttgtctagtctcgctattagaaatagtcccaattcaggaatctgcattagtacttacaagcctgttagtgagaagaacaaaactactttaaataacacattacgggagtggtgtattctagttccccccaaatcacctaaggccttgcaaagatttagttgtttattgaagagtggctaatgtgaccctctaaaaaattaatttttattgatataagttctacatgaatacattctacattctaagtacaaattttgcaaataaggcttaaacttcttggccaccatcaaccaatcttgtaatattttgagtcaaacgtggacatagtggaccatgtctatcatgttccttgttcagtgtcccctagtggtatgtcagaaacagaatattggattgtatggataattggtctggctcagggtggcatatatcatgtagagttataatgatagggtgacatgttgaatggagaatcataaatactgggaatggctggagagtgaaaatgcttgcctggggtagacacgccataacattctacctccagctccygctctgcttatgtttgggccaataaagggatctcattaggtatgttttattgtgtttatttttttcccctttttccacttaaagctgattatggtgtggctactcagggcttggtggctttgtgtgaaatggctcagtgtccctgaaccacttgaaggtggcagatagtgtaccttgctgtgcttgccccttcatctggaatgttctttttccctttcccagattctcactctcttcccacgtggaggatttctgttcaacctttaaggcccaaatcacataccacctgtgttctagggaaggtgtctgccatctcttcactctcttccaagtggagctgtgtccctcctgtttgtctgtgcttgtgtcccatggtgcttgccaccatggcattgtgggtggtgatgtacatgatgatcttttttccyrtggggcttatggtgcccagggaccactactctgttgaattaggtttgctgttgttgcctgctgtccatgagggaggaggggatgttcaaggtcagtctgctgtcagcatgctttctgtttctgtattgatcttccaatccttttttttttttttgctgtaaaatgacctgtaaagtttcttttctgtttattagattgtatctgctatagttgaacctgcaatgcacattcacctaatgttatgcttaacatattaattcatacgtggcctgctttaggacagatgggtgtctggtgaaaaacattgacacacaggtgaggactcaggagtccatggtgtgtttcactacagcatcctcatctgatttcctttatgccccaacatacgttaagtgatagagatactgtcagggtttgataacccttgagtaactagttaacatagaggagggtraatccttttttctcaatgttgtagtttccagaaatatttttctctggtgggcctcttagtcggagaagagtttctttttttttttttttaaatgtagtcacctagcatcaggggcaagggataataaaccctgttattctttgcaaagtggtcaggaccttcctgaagaggaactgatcttgttttaggttgtgcgagctcagaaccaccctggccaacttagcagtggctagaaatgtaaattctagacaattattattattacttttgagacagggtctcactctgtctcccaggctggaaagcagtggcacaatcagctcactgcagcctcgacctcccaggctcaagcgatcctcccacctcagcctccctgatagctgaggctatctgtagaggtgagctgtctgtgtcttagctattgaagtggatggtagaggtaagctgtctatttcctagcgtttgaagtggtttggatggtagaggtgagctgtctatgtcttagctattaaagtggatttttaaactgtatatctccctggagggccaggagcagtcacagctgctgactgcggtgtaacagagctgcaggggtgttggacacacagttcaaggtggctcgtgtgtgcagagccaggggatgggggctgagcatacgggacggtaggagaggccactgacccctgtgcatcaccatggcccttctccaagcccttttcctactgtgcattgctagcttatatattaatcatttttgttacagtcagtagtgtcctgtgtcaacttgtcagtaaacctagaaatttagaaagtggcagaaacagaaaacagctgctgcttaaaagcttattatagtgtagatgacaaatgaagtcaaaacatgatcaatactggtttatttcatattttacactgggccaagacaacttgaagttattattagaaactgttttgttcagaaagctttgtttttctgcatcatgcgaagctttcataaatggagttagtagcttttttgtttttcaaatgtaaacaaaagtgaaatttgaactaggaattatttatgtgctacttcatatttcatttctaacttgaaagcttaagattcctgatctttatgtgtggtctggacttgttgggtcccagagtaattgtttgtaatactgccttgtagaccgtagccccttgtttctatcagcatttgccagacracatgccaacttagcaatggctagaaatgttaattcttttttttttttttttgagaggatcttgttctgttgcccaggctggagtgcagtggcatgatcttggttcaagcaattctcctgcctcagcctcctgagtagctggcattacaagcgtgtaycaccatatctggctaatttgtatttttagtagagacgaggtttcaccatgttggccaggctggtctcgaactcctgacctcaagtaatccacctgcctcggcctaccaaagtgctgggattacaggtgtgagccaccgcacctgtccttagaaatgtaaattctagaaaattattatttttttgagagmgggtcttaccctatctccaaggctggagtgcagtggcacagtcatagctcactgcagccttgaccttccaggctcaggtgatcctccaatcttagcctccccgctagctgagactacaagtgcacaccaacatgccctgctaattttttctactttttgttgagatggggtcttcttacatcgtccaggctggtctcaagcatccttctaccttggccttctaaagtgctgagattataggcatgagccaccacactggcctctagaacattctttttgagagaaaggatcattttatgtgctaatctcattgttaagggacacagcaaactagcttggtggatctttaccatgcatgcattctttcattcagcaacttttattgaatgcttgaggtggcctagacatatcaatgagtcaatcaaagattcttaccctaagggtaggagtgggaggagtggacacagctgacaagcagtaaacccaggaagtaaatgttttgtgtgttcaaaggcagggggttctctggaaaaacaggaaagtagatcaggataagggggctatagatgggggacttggaattttaaaataaggtggtcagggaagacctcattgagaggatgatgaatgagcaaagatttttaagaggagaaggaattctttgtagagggatcagccagtgaaaaggccctctgccgagggactgagcgtctgggaaatagccacaaggcctgtggctggaggcagagaaggagagaagtgggagataaggcgaagaagtaagggttggccagatcttttccactgaccggacaacccgcaagtaacactgccgggccagtctttctcttttacagtgtttcttaactggggtgatttttgccttgcttccccccacccccaggggacatcagacgatggctggagatggttttgatcgtcacaacctggggagggagtgctctggcaagtsgtgggtagaggccaggcatgttgctaaactttccacagtacacagcccgcaaaacaaagtataatctggcccggaatgtcaatagtgctgaggttgaggaatcctgctctgttatctttatatagttcatcagttgttgattgatttagtttgtcttttaagatttaataaagaaaaaaacataaaaacgtcatgggaaaaggttattcatcacgttacctggttagaatgccttcacaattgacattgaagcgaatgctggcattttcattcactttgaggaaaggagagccaaatcttgcttccatgtatattttaggaagcgctggtgcattgaaggattacttaaaaaaaaaaatacaccattcacaggtaaatagtaataatcttactgataatcttattaatttggactcaagtaggatttcctaattttgaggaagtctagactgttgatccacaccagggaaaatgtttgcatatgtggggaaagaaatgattgtcagtacttggaatgaaaagtactattcttcacatatgaatatgatggtattagtaggaatattttccttggattttgctaatccagtattttttagacatcagtcatttgtgtgccacttttttctatttttattttaataataccacctggatttttcttcatatcaaataacttcttttatttaaacacattttagaaaactttcatcagttgctctaaatgaaacttaaccaaaatgtaaaacagaaataaaataacattaaattctatatatatagacacagtgcctgcaaaagattctgagctgagatctgctttgtattaaaaggaagattaccagtcttagggaagtgttcaagacatgcctggacaaagggaatttccttgatttaattggaaaatgaagaagagaataactgtcccactgtgtgatttaatgacattcagtgtgtcacacttgaagatatgctgtctcaagctgtctgcactctgtggccaggtgaccaggctgtgcacttgcagcatggctggctgggctcaaagctgtgcctgatagtatagaaacaaccagtgagagaatggaggcgggatctcgttggctgtgattggccaccaatggcctattaatgcagaactctcccagggtggtagcagctagacagcctggttctttgttctttataggactaaaattgtaattscattgcttaaaacagaaatccctgttatttagacttattatttctgatgaattttaaacatctttcctctctctgcccttccttatatacttaacatgaattaccaaaatttgttctactaaattcattaataagatgattgaatacttttgattaattcgtgtacattatattgactgtgcgaattcattaattttacttgaacagttacgtttttgacctttttttatttgagactgagatacctcattttgtaagcagaagcaaattagttaatgtctttggctgccttctactcacattgtgggtacacctacaggtggttttaggctaggtgctgcatctcaggtttggttttgtgaaagctggattttctcagctttctcaggggctgataggctttcatgaattgaatcctggtaatcaaagtcttggtagagtgatttctatagacaccggtgtttattaagtgtctgtactatgtgccaggcattatatcacatggtcccagtgtttaaaggacctccaggtctagctctacagatagaaacagtctacttagaagccaggtctgggctgggcgcggtggctcatgcctgtaatcccagcactttgggaggccgaggtgggtggatcacctgaggctgggagttcgagaccaacctgaccaacgtggagaaaccccgtctctactaaaaatacaaaattagccgggcatggtggtgcatacctgtaatctcagctactcgggaggctgaagcaggacaatctcttgaacccgcgaggtggaggttgcggtgagccgagatcacaccattgcactccagcctgagcaacaagagcaaaactctgtctcaaaaaaaaaaaaaagagaaaccaggtctggtggtgcgcgcctgtagtcctagctacttgggaggctgaagcaggaggatctcaggagttcaaatgtagcctgggcagcatagcaagaccctgtctctacaaaaataaacaaaaaacagaaagaaagaaacagtctacttagagttaatattgtaccactttatgtaaaatgttgaagcctgacaactgcatagttccatttactgctcctgctttatgttatagtttaaaatatatagaacctctatatatgttataaattccacagcacaaggttttaatttttgctttaaactatcatatgcatttttaagttaagaagaataatagtttttaaatatttactgtttctaatgctcttgattccttttgaagatacaggtttccaaatggtatcattccacttcagcctacagaacatcttttaatatttcttatagtccacattggctggctgtgtaaaaagggtgtgttagaaacacatttttagcatttttttttaattggacaatgtcagattcctggaggatattttcactggatgtcaagttctagattgctagttttgtctctcagtcctttaaagatgtggtttcgtctctactaaaaatgcaaaaaaattagccgggtgtggtggcgggcgcctgtagtcccagctactcgggaggctgaggcaggagaatggcgtgaacccgggaggcggagcttgcagtgagctgagatcgtgccactgcactccagcctgggcramagagcgagactccgtctcaaaaaaaaaaaaaaaaaaaaaaaaaaagatgtggtttcactgtcttctgcctctactgtttctggtcaagagtcagtggtcactcaagccatgactscatgtgtatgatacttgttttctctgctgctgtccggatgatcatgtttggttactagcagtttgactctaatgtacctagatgcaattttctatgtatttatcctcttggcattcactaagatccttgattttggaaatttacgtctttcaccaaatttgtggaatttttggtcattattttgtcaccttcattctttattaagtccactcactcagtgaatttttcaatttcagataattgttttagttctcaaatttttatctggtgcctttttatattaatgtttctttgctgaggctccttctcattcatggcatattttcctttccatccataagcattattgtaatagttgctttaaagtccttgtctgtaattccagcatttgagtcctctcagagtcactctgttttgatttttttttttcttycagctagttcaggttttctcattttcttcatatgttgagtaattttggagtataacctggatattgtgaatgttacatgttgtagaacctctggattctgctatatgcctccaaagagtattgattctgtttcttttgttttattttactaggcacttaaattgactggggtcagactgttaactcatcacccctagagtggataatattccaaatcttggttcaattcttttagccttagctgtactgattggaatttgtcacacgaatgcttggtttagggctcaagccagggtttgggcagagtttaatacagaggcttcccctgtttgactctttcctttctgggattcctcctctttgcccttccccatactctctagtgtctgtggttgccctgaactctggaaatacaaacataagcaatattagtaatagaatcggctaatgatttaatgataataataattctgactctgccactctatgagtagcaattttcttaacttctctgagctgcttttttgttttctaattttttttgagacagggtctcactctgtcgtccaggctggaatgccatgctgtgatcatagttcactgcagcctcgacctcttgggctcaaatgatcctcccttctcagcctcctgagtagttgggaccatgggcacataccatcacaaccactgagtttttatatttttcttagaggcaaagtctcaccttcttccccaggctgatccccagcttctgggcccatgcgatcctcccacctcagcctcccagagtgctgggattacaggcgtgagccactttacctggtctgttttttatttttttaatgggattaatatggtttttaatcaagatttaacaaactactgctactacacagaaagctcttagcacagtttctggtttataggggtaaccaagaagagtaaattattattcattattttatggcttatacatagcttttatttccttgttgatagtgtagttttatatagttaatgtggtaggatcattaatattctccagtaacatctatwctttggtggagctaattgctaagtttgttagttgtctgactaaacacagwtttttgaagagtgtctgggtattttctgttattttaaaacaccatgttcttaacccataaagtacacagtgatcctcagaagatcttttgaaacccctgatcctgtatgaaaagtattgaatgtatatgactgtagatatcttcaggttccaaaactgtctgttaccccaaagcttgggaactactgctttaaacttaacgttttcaagtccattccagcctgggcctgcaaatgctatataactctctgtgggatcgaggctgcctattccttctggactctgaagtgcattgagaatagctcgtatgcagtgactctggtcatcgggcttggctgtgactcagtgtggacctgttcatccaaggcagctattgtgcagagaaatggcatatttgattatgtgatacatattttttctgtaactgtgtaattctttattaaaattctctgagtagctgttatacagtgtaaatttttaataagctcatattattagcctaaaataattagttgaggaaaaatgtggttcacgttcaaagaaaagtaagtacctaggcacaaacttgtcatctctagattgaactcttttccattactgcctgcattgactttgggttttctacctgcctggtaggactcctctactttttcacattagtgccatcaccaactgtctagttttcagggcgaggggtaggagggatgcatttccacctctagagcaggtgccgattaatctttctggaactaactattgakgctgttattttgccaaaattagcctcagggaagtcctcagcagcctgtttctttatctttattttcctaggttagcaatggaaaggctaggtgggggagtgggagaagggagggctctgccaggtgtgtttctctttactgggcacaaactctgccaggctgtcttggaaatagcaagagtcctcttgataattagctctcaactccaggtagttccctgcctgccttatcctttcagtgatggcctcttttctagcaggaatgggaggagaagatgactgcttaatagaacaagttggtcatatcagggattcttaaaaaaagatggttatatttctttttttttttctttttgagatgaagtcttgctctgtcgcccaggctggagtacagtggcgtgatctcgcctcactgcaacctccacctcccaggttcaagctattctctgcctcagcctctggagtagctgggattgcaggcatgtaccaccacgcctgggtaatttttgtattttagtagagacgggatttcaccatgttggccaggctggtcttgaactcctggccttaagagatccacccacctcagcctcccaaagtgctgggattgcaggtgtgagccaccgcacctggccaagatggctacgtttctaaaacttctaattttaatcaaagaatggatattcataggctgaccgtgtgatctgagccaaggccttgccttgcttggcacatggaccctttcccttcatccatagatcacaccggtaaggcctcgtctacatttccaggttcagtgtcttatgtggagtgagaagacttgtatgtcaggcaatgcaaatgtaagcccttgtcactttttacagtgtgtttacagtattttccacttgttttatctactcctaatttgacagctatattttaataactcatttttattgaatctttctgaagaattcaaactaacgttcagaaataacagcacaggacctgactgttagtaagcaggtaactcctgttgggaatagctgcgcatgagcctccttctggttagggcaaactgggtgagtgaccgagggaaagttgcctaacttctttaggtattggtttgctcatcggtaaaacaaggataaaaatcttacttggttgagttggtgtgggaattgaaccacatgtgaaagctacttccctgtccctggcctattataagagctcaaaaaatgtagccattatttttattattatcatcatcccaacaactccccttaccactgttattcctagagagtagcctctttgctatgagtgttcattgccctgggattagtcagtgtgttttatagagtggatggaaagattaagttaattcagtggttggtgttttgttggagagcatacttggtaaaatgcatagtcttagagtaaatttactcattatgtgtttaataatgttccaggggcacatagtaggtgctcattaaacacataatgagtacattcactttaagactatgcattttaccaagcctatgtgctaggcttggagaatccaacagtaactggacatagttctgccctcaggagcgtttattgtgtaaggacttcctgcagataaacagtgaacttcctgttgcaggaggctggctcaggttgccatcaccaggggcacttgaggtgtgaggagagtgggaaggcaagccattctaaagaggctgcgccctagctgagaccttaagtctaaatgggagagagtagatagggaacagcatcttctgaacactgtgggggatgtgaaacatgggagtaagtaaagggaggtgaacaatgtcaaggtcagccagatcctgcaggtcttcccatgcatggtcccactkactccagcatcctgatggcacaaggaaggggtctcatcccaccctcaagatgagaacacggaagtgtggacaggtgacgtgacgaactctggccacatagcagtgagtggtagttgtgggattcatcccattccaggtgtgtttggctccagagcccatgaattcagctacccactgcacaggagggaaaagagcaggtttaaagaggaagaagggctaggcatggtggctcatgcctgtaatcccagcactttgggaggccgaggcaggtggatcacctgaggtctggagttcaagaccagcctggccaacgtgatgaaatcctgtctctactaaaaatacaaaaaattagctgggtgtgatggcgcatgcctgtaatcccagctactcraggctcaggcaggagaatcacttgaaccagggaggcggaggttgcagtgagttgagattgggccactgcactccagcctgcgcagcaaagtgagactcygtctcagaaaaaaaaaaaaagaaaaaaagaggaagaggaaggatgataattggctcatttttggccacaatgagttggaggaacttgttggatacctgtgtggagaggtgtggttgggtgttgtggggccacagatacrgatggataggaatgtatgtcatggcatctttgacgctacatgagtgcgtttagaacagaccggatgtggggtggactttctgtcagagtcttgctaacaagtaaggccaaactgatttgtttttccttcaactgctttaacctgtttgcacagccctgcgtggtgagcagggcttcttaaacagcagggctttcttagaggtgtacatctgctcacttgctgagttctccagtagaggattggttcctttcactcatgcattagacagactgcactaaaagaaaggcgtccggctcttctttgttactctggtacctattattttcttttgcggttcttcaactgaccatttcattttgggtgaattctcaaygttgcgattcttagagacttcagctgtgaaggtaraacacatgccacaaggccatgtctttgcccaagtgtgacttgtcacagttgatgcacacttttgagcgtgggttcccccccttcactcttcctttttagatggatttgaagactatggtacagattgcgacaacatgagagtaacggccttcttggacattccaggccaggataacctgcctccactcactcgcctggagaagtatgctttcagcgagaacaccttcaaccggtaagcccaaccaggcctgtgtatgttgacaactctgtgttgtgtgctttaagctgacacttggggccacttctctgtgacagctttgaggagacttcatggatgatgaggtaggttggatayagattgtcaccaggatgctgggcttctgtctgaatggtaccatcttattaggctttttcattatttttgttattgttttgctgascacctggtaagccaggaaggaaatggtgatgaatttcatggtgtttaagtgattaggattgctaactgggtttctttcacatatgcagtactcagaaaaatcatgcattccttrattgagaarcaccaagaagcgtcagttggaagcattgtctgcccgctttgtattttgactgcgctgtgtatcaggaacttcggtggcaatgtgtcatgccatgctccgttgtcaccgtgtacggkgttggcagggttcgactccaggcccaccttggctcagtagatgaccttgattcttaatatcctgaagaaagcagaaattaaggcttccctttacatttacgtgctacccaaacttctgtgaatctgaaagcattctcccctcctttctcagcagacagtctctctcctcctgttctgccctttgatgggccctccgtccctgatccctcgcccccctcaggtttgccttctgtcgtctgtgtctcctctcctgttacaggtgcatattcaccccacttgcaaccctgacttgtcttgttctaaactatcctctgagcttccctacttccttccccatgtagtccctaatacaccacctgccaagacttgatggtactcacrtagcctctttccttaccttcattggctcttgcttttaaaaattacattctggctgggcgcggtagctcacgcctgtaatcccagcactttgggagtccaaggtgggcggatcacgaggtcaggagatcgagaccatcctggctaacacgatgaaaccctgtctctactaaaaatacragaaattagccgggtgtggtggtgggtgcccatagtcccagctactcgggaggctgaggcaggagaatggcatgaacccgggaggcggagctcgcagtgagccaagatcacgccactgcactccagcctgggtgacagagtgagactccatctcaaaaaaaaaaaaaamcaaaaaacaaaaattacattctataaaaaaaaaaagaaaaagataaaacgaaaattacattctatgccaaatataggctaagccctttcatctattaaatcatagaaagctcacaaggatgttatggatggatccatttaatgttgcaggatgagtccattgttattctccttttatgctagggaatgatgataccttgaatggtgtcttttttcttttttgtctttctagttttggcatctagctaccgccaaataatgtaatttaattttattgtttctggactttatatatgkgaaatcatacaggatacattacttttatggatttcgcatatattaatagtttgaatttgttctttttctaatagtgttcttgaatatactgacatttatccatctgctattgttaaagaagagttttgctgtgaacagtcttgtagatgtatctggggacacacaattakgcgtttctgtaggacatgtacccaggaaagaaatactgtgtgacggtgtatgcttatcttctgctttagtagataatgccagttttccaaagtggttgtatcagtttatactcctacctttgccctactttttttttgagacggaatctcgctccattgctcaggctggcgatcttggctcactgcaacctctgcctcctgggttcaagcaattctcctgcctcagcctctcaagtagctgggactacaggcgtgtacactaccacgcctggctaaggtttgtatttttactagagacaggtwtcaccatattggccaggctggtctcaaactcctgacttcaggtgatctacctgcctcggcttcccaaagtgctgggattacaggtgtgagccactatgcccggccttacctttgccctacattttatctgccaattggtattgtcagatttttgtattttagccagtctgtagtttggtagtgtatataacgatatcactttgtgatttgaatttttattttcyttactgtgagtttaaacactttttcatatgtttgttggacatctgtatttcttttttgtgaagtgcctgttcaaatctttggttgaattggtagggagaagatggattgtttgtctttttattatcaatttgtaggagttctgtgtatattctagatttcaaacctttattaattatgtatgataaacatctttcaactggtggcttgtgtttaaactctctttatggtgttcttttggtgaccagaagctattggttttttatttttatttttattttttgttttttttttttgagactttgggtaacaaggtaacaagttctgttacccagctagagtgcagtggtgcaatcatagctggagtctcaaactcctgggctcgagatcctcctgcttcagcctcctaagtagctgccactacaggagcatgcccagctactttattttgcatagagacagggtctcactatattgcctaggctggtttcaaagtcctggcctcaatggtgtgagcaccgtgccaggcacacaagtattcactttaatgtagttaaatttattgacattttccttaatagtgcattcggaagcttttttctctatttctttatattgctttaaagcctttattttttttctgtgaaatagatatactatagttctgtaatctgcctgaacttaatttttatcatargaaaaatggctccagcttcattttcctaattgtcacaatgtcatttatcaaaagtatgttcttttcccactgctctggagtgccacctctgttacagtccagcctctgtttacagtctttggactctcccctcttttccagtggtcccctcagccaatactacactgttttggttgctatagatttataatgagtcttgatatttgatagaacaagtcttcccatcttgtttttcttctttggcatgactagttattcttggtactttgtattytcatgtaaatttaaaatccagctcaccagattctaacaaaatgaaacaaaacagaacatctattaggattttgattgggtttgcattgaatctataggtcaatttggagagtattgccctttttacaatgtgtagacttccaatctgtaaacatggtttatcttttcatttatttaggttttctttagtttctcaatacagtctgatcattttctctgcagaggttttgtgctttttttsgttgtgtattttaaaggaaatttgagacatcatattttatccagttaaggacttagaacaaatctaactgtactakcattatcacatttaacaaaattaacaacaatgctttctagtttatcactctatgtcgagttttcctgactaaaaaatacctttttatggttgatttgtttgagtcatgatccaaataaggtctatagatttcattaggtagatgtgtctcttaagtctctttttgtttacaggtttttttccttttgatcttaaactctttttaatctcaaatggttctctgtttcatctttctccatatcatttatttgttgaagcggtcattagcttagagaattttccacattctgtatttggtggtcatgattctcatggtatcattttccctgtcttttctgtaaactgaaaattacgtttggagaatttattatattctgcttcaattttttttttaagcaatacttcatatgttgttttgtgaarttcttattacaagacaccaggaaacaatgtctagttgtcacacctttagagatttcatattgagcagtgggctcaggtgttttattctttcattataaaattcctcaccagtctttcttctgatgatttcaggattcacaaataatcattgcttaaatctgttatttcattctgggttggaaaatgacaattttttttttattgtctgtgagatgtgttgtgtccccatttccatcctgttatttgttgtttgtgccctctctctctttttttatccccctrgataattcttaccagaaggttatgaatttcattagttatttcaaagactcaagttttggctttgtttctgttgtatgtttgttttctataatagttcaataatatctgctctaatctgtattattttttccttgggttttttttttttttacttttgggatttaattgctgttctttttcttactttaaggatatttagctcagttttttgtttttttggtttttcttttgtaacatctgcattttatattgtacaatttcctcttaagtactatgttacctcaagttttgatatataatgtttttgttatttctcagcacaagtatttttaatgttaatgatttctcctttgatcatttagttattcagaagtgtgttatttccagatacttgaggattttgcagatatctttctgttattgattcctagtttaattcgtttgtggtcagagaacatactttgtattttttctcttttaaatttgttgagatttattttatggctccgaatgtgttctatcttagtaaactattacatgtctgcttgaaaagaatgtgcgttgcaatgcactgcaatgttttttgggtagagtatcttacaaatatcttataaattaggtcaagggtaatatatgcttatctattttctgtttacttgttctgtaaattactaagagaaatgttgctacctgcgtcgacaattgtggatttatctacgtttccttttaattttagttttacatatttcacgtattttgaagttttgatgtcgggtgcatacacatttagtwttgttctggtttgttaaataaattgatttctttttttttttttttttttttgagacagtatcttgttctattccccaggctgcaacctctgcctcctgggttcaagcaattctcatgcctcagcctttcgagtagctgggattacaggcatccaccaccatacccagctaatttacatatttttagtagagacagggttttaccatgttggccaggctggtctcgaactcctgacctcaggtgatccacccaccttggcctcccaaagctgggattacaggcgtgagccaccgtgcccggcctgatttattaacactgtgtaatgtccctttttttccctagtgatattctccttttccgaagcttaccttgtctgatattaatatatacactctagctttcttttgattaatgtttgtgtggtatatttttgtccatacttttattttttacttatctgtctttaaagtgtgtttattatagaaggcatataattaggtcttgcttttttatccagttgtacaatctctgcctcttaatttgaatgtttaaatcatttccatttgatgttactattgatatggtttgtttaaatctaccatcttggtatttattttgtatttgactattcttgttttctgtttttcctgccttaaatatatcagtttttttccactgttggcttactcgttatacagtacctcttcttaaacatttttatggatttttctagggattacagtatacttcttttattcatcatgacatatgttcaaaatgataccactttccatgctgtagagttggagatgttgcataagagcctcacaacggtgttcttccacctcttcccctccatctttcacgctgttactttcctacactttacttctacacaattcatacatttcagaatacctttttactatgtttgctttatatagcaactatcttaaagcaattacaaataagaaaaagatttttaaatatttgccatttttttcttaccatttttgatgttttttgtttctttttgtaaaatgctcatttctatcaggtatccttttgcttcaagaacttccattaacaatttttgttttgtacaagactgttgtcagtgaattttctcagcttttgtttatctgaaaaaacgtttcatttccattctttctttaactaatagactatttttggcgggattttagatttacagaaaagtcgagtgggaaatacagaaagttcccgcattccgtagctgcccagtgtgccccgggtttcctctagatctttccatgctgttcacgcttatcttaaagtcctcgtctcatctttccgacatccagggtttctgcctaacttctcatcctcacactcctcatctctctggctagcccctctgtgttcttctgtgtttctgtcatatcctgtgggcactctctgtgggtcctgtccctactggtcatcataattttcttgtttacttccaggcctagactgtaaagctcctaagagcagggcctggaccttgcttatcctggtatcccaagcttcttgcgttgagtctagagttggttgggcttaacacataattataactgagtgattgagtgatacttccatggctggatttccagggaacattggttatattgccacgtaaaattaagccattctcttttttttgtttttttttttttttgagatggagtctcgctccgtcacccaggctggagtgcagtgttgcaatctcagctcactgcaacctctgcctcccaggttcaagtgattcttatgcctcagcctcccgagtagctgggattacagggacacatcaccatgcccagctgatttttgtatttttagtagagatggttttttgccatattggacaggctggtcttgaactcctgacctcaagtgatctgcctgccttggcctccccagccatcctctttatattaaaaaaaaattcacaaacataakacatgcccattgaaatatttaacaacttcaggaatttaaatagagtttccctccctcccccactacaaccttgggaagagctgtgaagtttggtgagtacccttctagattgcttcctaaataagtgtatgtatatatgaatgtgtttatgtgtacatgtgttgcacatgtatacctaaatgtaacttgtattaagaaatgggcttggctgggcgtgatggctcacgcctgtattcccagcactttgggaggctgaagcaggcagatcacgaggttcagagataaagactatcctggccaacatggtgaaaccccatctctactaaaagtacaaaaattagctgagcatggtggcgtgcacctgtagtcccagctactcaggaggctgaggcaggagactcgcttgaacctgggaggcagaggttgcagtgagctgagattgtgccactgcactccagcctggggacagagggagactctgtctcaaaaaaaaaaaaaaaaaaaaataagaaatgggctcataccatatgcaaaatttttcaccttttttcatttaatgtatcatggatatctttctaacttagtacatatctagaggtactaaggccatacaaatagttgcatggtatgcaagggtatagatagatcgtaatttatttaagcttctctctattcatttgttgttggcagctgcatgtcttgtaatctagtggctggcgccgtagaggacttacagtgtgccactccccagctttgtgcttgctacacaccatgtcgctgagtctccctgcgctcttctgagtcaggcagggtttgtctctccagagggccgctttcttctttcatcttattaacaaagctaacaaacaagtgagaagtattgaggccgaggcttcaggactctgctcatccactgtgggctctccaggtcattgcaaagcagccaggttttccaaaatggtggttccaaagcaccaatttgtttgagtctttacctcactcctgttctgttgtggagttgtctctgcctcaggggtcctctcttatccctttccttgctttctttaagagggcaggtcccttgtgaccacttgaggctggatgtagatttgcctctctgttctatggccctagaagcagattggggatcttagttgcttgatttcccaagggaagctgaatgaatgtggtctagtgaaatgtaattagtgactttctctgcagtggctattctgactttccaaaacctcttggctgccagatcttgatctttcatcccgagggtggtataaatctccctggatacaggcttgagttgatggatttcttcctgtaatatactgggccaaaggactgccccttagaattccatatttctagtcttttttgcctgcaagtcagggtgggttttcaacttcattgaattcttctgatgcatgcatggccagaaatgacatgcattgttcctggatggtgggttgctcagaggagtggacagaagcagtcaggggcccctttttacgtgatcagagaaagccttcaggagctccagttcctctgcttgcatgggaggcctccagatcaccccaggccactgctgatggccctcactttatccctcatcagtgtctttgtttaaagagcgtttattgaggcatagtttatatgcaataaacttcaaccactttaatcgttcacttggatgaatttggtaaatgtatacagtaatccaaccattgtcacaatggagttcaaaagtttcagtcacctgacaagtacccttatttgccccttggctgtctggcactccctccctccctgaccaccatagggccaggcaaccactgaccctgtttctgatgttttcaaaagattttgccttttctagaatttcatataaattcagtcatatgggatgtactcttacatgtctggcttctcttccttagcaaaatgcattagaattcatccctgttgttatcaatagctcattcctttttattgctgagtatgtacagataytctgttttgtatcgcattcaccagttcagggaacactgggagttttccatttcgtggctgttrtgaataatgcttatatgaacatttgcattcaactttgtgtggacatatgttttcattttggatgggtaaatgcctaagagtgaaattgctgggttgactggtaagtgtatgtttagcttttagaggaattgccacactgttttccaaattacctgtacaattttgcatttctaccaatgtctgtggattcctatttcatatctttgccagcacttggtattgtcattataattttagttcttctagtagtgtagtgttacctcatcgtagcttttgcatttttggccttgtgttttgttttgtctttaagatttttattttgaaataattttaggtttacaggactgttgcagagatagtactgagagttcccttataccttttgcccaacttctaatgcagtggctttcaattatgggtaattttgcccccaaaggatcttatacaatgtgtagatacgtttttggttgtcacatcttggggcacagagggtgctgctggtgggtggaagccagggacactgctaaacctcctgccgtgccccagacagcccccccccccccgcccccaccaacaaagacttacctgctccaaaataccagtaacgctgaggtcaggaaactgctctaatgtttacggcttaaataagcatgtgacattgatcaaaactaagaaaataacattggcattggtgtactgttaactaaattacagatttgacttggattctgcatttttccattaatgttctttttctgctccaggatcccatcagggtactacattacatttacagttgccatgtctcctgaggctcctccgtctgtgatggtttcttgttctatccttgtctttcatgatcttgacaggtttttttttgtgtgtgtgatagggtctcgctctgtcacccaggctggagtgcagtggtgcgatctcagctccctgcaacctctgtcttctgggttcaagtgatcctcccaccccaacgctcctgagtagctgggactacaggtgtgtgccactatgcctggccaagttttgtattttttgtagagacggggtttcaccatgttgcctaggctggtctcaaactcatgggttcaagcaatctgcctgccttggcctcccaaagtgctgggatcacaggtgttagccactgtgcctggctgatttgtagttttctgaagacttgtgatgttgagaatttttttcttgtatttcttggctgtttgtacattttcttttgtgaagttgttaaaatcttttgctttttaaaagaataaaacaactttattgagatttagtttacatgtcgtacgtttcaccactttaaagtgtacaagttgatggtttgtagtaatattcacagagttgtgcaacattgccacaatgaattttaaaacatttttatcacctcaataagaaacctggttcccattagcaaccactacccattcctctccaatctcccagccctaggcaaccactcttttactttgtgtcttcattgatttgcctattccaggcattttatagaaatgtaatcatacagtatgtcgtcttttgtgactgacttcattcacttagcatgctgttttcagtattcatccatgtttcacttgagcctaggagttcaaggctgcattgagctatgatcgtgccactgcattctagcctgggtgacagagtgagaccctgtgttgtttttttttttttttttttwaaaaaaagctacatcatgttgtagtagtatgcatcagtacctcattcctttaataatgctccattgaatggatacgtagtattttgattattcactcctcagttgacagatatttaggttgtttccatctttcggttattagtattaataatgtgctgggctcatttatgaacacttattcttttaattgggctgtttgtctgcttattatkgagttataagagtacaaggattatttatatattctggataccagttttggtcagatattttctccagtctgtggctcatgatttttattttctcagtggtgtggtttagggagcaaagttttaaattttgatgaagtcaaatttatcaatttttttcttttatggtttgtatactttggctcctcagaaatctttgtctaacctaaggtcacaaagatttttttttctcttcaagaagttttatgttttagttcttacattasatctatgggtccattttgaattaattttggtttatggtatgaaataagagtcaattttttttccccccatatggctatttattctagcaccactttttgaagactttccctgttcacctttgtaaaaaaaaaaaaattacttggtatatgtgtgggtttgtttctggacttcgacatttacttttgtctatttctccttgcagttgtattggtttttgctgcatgtattttgaaactctgttattaggcatataaacatttgagataattatgtcttcttcatgagtttacccctttatcattatgaaatgacctcttttcccttggtgatgttctttgctccaaaatctgttttgtctgatattaatatagctactccagctttctttggactattgttagcataatatattcatcttttattatttatttgcatctgtatatttaacatgtgtttcttataagtaatatgtagttgggtcttctttttttttatccattctgttaatctttttctaattgcaatgtttagaccatttacatttaatgtaattattgatgcagttaggtttaagtatatcatcttgctgtttgttttctatttgtcacatctgttttgttccctttttgttctttgtctgctttctcttgagttaattgaacttctttgtgattttagtttgctttttaaatagtttattagttataattcattttttttattttagtggttgccttagcatttatagtatgtatatttaacttaccatggcctaccttccagtggtattttaccacttcatgtatagtgtaaggaacttatcatagtatgccttcgtttcccctctcctggtctttatgtgatttcgtcatgcattttattatatatgtgttataaatccacaataataataaagtgttatttttaacttagtcaattatttctgaaagagatttaaataataacataaaagtttgtgtatctatgcatgtagttatcasttctggtgttctttattcctttctacagattcacatttccatcggattttctttatcatttcttatagttcagatctgctggtgatagattttttgaatgtctaaaagagtctttattcttttttaatttcttgtctttggatggtccacagttcacagtggcctcctgggcttgtgggtccactctttgggaaggccccacaccttagggtacccctgccccccgcctgctccattgatcagtatactgatggaattagctgttgcagagatctttgacgtgtctcctcagtaggccttttgtagctctagctcagatcatgcttatgatgggacaacatcacttggtcctgcaatgacaatcacattgtctccccccatggccatagcttcctctgtgtagaatgccatagtgcacatcattcctctgttgcttgccatcttgtggtgagacttttctgagttgagtcttggcctgttcctcagtctcgggctgacttaactgttctcctgtacattgctcaggccagtggactgcaatgatttctctttccttttggtagttgccacttctgactctatcttgrttctcttgaccagttctgcctatagtgggatgcagtgtccccagctcctccttcccttgctgccctcaaaataaacatctgtagctccttctcattttacaggttttatggttaatcagcacagggagataggaaagtaaaaataataaatgtggagaaataacggaattttaaaaattctctcaaggctttccaagagaatttctgcagaatttctagttggcacttactcattcagtcattaagaggccatcagatgcctctttgggcctttctcttctgcatttattggtcccttagttgccttcaactgtcttgagcttttcttctaagcctatgtaggcctgaggaaccagccaaaaaatgagaaaaaggttttgccttattctcaagtggacattttcaaactctgatgactaccagactagaagatgcaggcctcctttcctgtaggactgtggcccatgctggaatggccgtcgctgggcattcctgggtagcctccgtcctccttctggacacaggttgctcattttgtcttgtgcccaggtgcacttacctgctcttagcgcaatgcctggaaccttgtggtccttcagtcaatgtggccccaataaccatatgcattgtttttgtctccataggcagattattgccagagggctgcttgatatcttccgggacttcggtaacaatgaagaagacttcctcacggtaatggagattgtagtcagattgtcagaagatgcaggtttgtatraggattgtataattttattttttacttatgaatttctaagaaattatgtataaccagtaatagctatttttwaaaaaacctgtttattaatcaataacctttaagcagtttytaaccatsaatggattttgtcttgaagaatgtatgtcttatttgaattttgactgaaattttcttatatttagaaaattaaaatgattaatggctacgaatgctgtttgccttggcagttaggcctttggtatttcttgagttttgccagactactggttgctaagaaatgccaaatcaaaagaagcctcttgggttcgaaaatctcagtcattagtttccctctaggcgaatcttgatttttctttctcattctacctctccatgattggtatcgtggaagaaaagcacgttgctgtacagcagatatgatgatgttgtcttcccccccgccccagtaaagatgagttagatgaatgagtggcggggctggccggtactgacagctgtgccacagccccctccttcctgcattcagaatgaatcatgagaagcttcagaaagtttcaggactctcagcctttagagtttaatcattttaactgaaaatagaaaaataagccttccatatagctcccacattagttcaaaatatttatatgaatataacgcaatgcttttaaaaacgcccaagtggatgttttgagtctttaaatggattctctttgtaaatgagtcaccgtttacagtgctgtagcaattatacatttgtgttaaatttaatgtggtatattggagctagagccgctcttttgtttaatgctttgccttagaaataattgggatgcgtggattgtggcggagtgcatttatgaaagaattatttataatgtatacattctggctagaatttaaataagcacaacccataggtctggcagataaggcattagttgtaatggcttttggatgctggcccagcatgcagacttcttgctccctcctcaaatttatatatggcttgttataatagagttgtcattctctcttctttttatgtttttatattgctgtatagctcattagctttttaagcctgtctgtagcataaatactctaaatgggaaatgatttttaaactgcatttgtctaatttccttgatgaagtattttagtaagaaaagctagaaactatcagtatatactatctaagatgcttggcttattcttaatataatttttttwaaktttttattgctgcagagcccacagtgcggactgagctgatggaacagattcctcctattgccatttttttacaagaaaacagatcaaattttccagtggtgctctctgaatatctcatacctattgtagtgaggtacytcacagatccaaacaatcaggtttgraaaattataaccttaagatctctttagcaaattctctttagtcttgttttagctgatattcatactacaaaaaacaacttcttagagttaagtgattctagaacaaaaggtctatttgtgtccagttcctctagtcatgtaggaagatagacagcactcattcttatcatgaaatatttctttttttctttagcattttactatggaaattttcaaacgcacataacagtagagagaatatgaaaatgaatgcccacgtgccctacacctggcatcaaccattgttaacgtttgacctggccgggcgtggtggctcacgcctgtaatcccagcactttgggagtctgaagcaggtgaatcacctgaggtcaggagtttaagaccagcctggccaacttggtgcaaccccatttctactgaaaatacaaaaattagctgggcatagtagtgcgtgcttgtagtcscagctactcrtgaggctgaggcagcagaattacttgagcccggcaggtggagattgcagtgagccgagatcgtgtcactgcactccagcctgggtgacacagtgagactctgcctcaaaaaaaaataaaaacaaaaaaaattcgattaattttttcatttatcttaccgagataaaatccaatccagacaaaagaatttgcagaaaccatctcatttcagctgtaaatacttttagtattgttctctaagaaatagactcttttaaaaaaaaacgatagtatcattaatgcaaatataaaaattatcagtagttatctaatgtcatctaatatctagtcattggtcaaatttcccagttttctcataagtgtgtgtttttgcgcagaggccgttcaaaccagaatacaaacaatgtccacacattgaatctaagtgatatatgtctcttagatcttttaaaatttataatgttgctcctccccacttttttcccttgctatttatttgttgaggaagccaggtcattagttttatagaatttcccacatttgggatatggtttattgcatctctgtagtgttaagatgttgctctactccaggcatttcttataaactagtagctaagttggaagctcagccagactcagattttttatttagtgagaatactttgtagatggtttgtgttttcctgctatatcaaatcgggggcagaaaagctctggatggttatcttttcctaatgctgaatttggccaccttttctgtaaaggtggccaaacttctataaagttctccatcatcgtatgagcaaccattggtgatggttgccctgatccagtatctcattagaggctgtaaattctgacacactaattccaacatctctttttagtttaatagctagagttcttctgtaaaggtttcctctatcaactatttgatagccctgaaaacctgtttgaatagggaagatagaataaatgctttattttatccctttatttaccagtttccaggatcatcgttggcgttttaataatctacaaaggttaccagttaggttttaaaaatttttttgagtattgttaggaactcccacattttaacatagtagatatgtttcaaactgttatagtacttattctttttttttttttaaattatactttaagttccagggtacatctgcacaacgtgcaggtttgttacagacgcrgtaaaacactttcctcataattgtcatatttttaattttgttgaatacttggatttcgttcaggttttgtgtgtgtgtgtgtgtgtgtgtgtgtgtgctgtagatgcagtgaacatcggaaaggatgtggttttgtcctttcattgacttttctttttcctttggattcattcttgaaaatgagattacactgagtcaggggatttgacatttcttgacctttgtccagtagcattgctgtatcttctcttccagaagagccgaggcaggaagcgtggttttgactccagaatctagcatggtgcctgacactcagtctgtgtttgctgaagagtcatattcttggtcgagagcaggcactccgatggtcagcccgagctgtgtgtgcacccagcttcccaatgtgtccgcacccagcttcccagtgtgtgcagatctgccgcacctctgcactcccacttccactacaaacacagcttgccctcctttttttgctcccctgccgtgggccttcctgcccccacaggcctctggctctgcagcctctatttcctgcctgcatttacttcctgttgttcctcagcggctccctctcttgtcccaccctttcaggcctgtccctgccatcaccctctatttacttgtccttttgatggtgcttctgccacgctggctttgcctgtcctccccagcccttcagtgtcctccactgcttgtggccgagcttggtggagggagtcctgtcatgcactgattggtgccgttgcaaattgatgggttccagtcgtggctgggcttgcagcattgcttggcagtcctttcccttgtccctcatcagctgcatttcccattatccttggcagttctcttagaccttcgccatttcatcaggcctctcccctctgcctgcctcgcgccaagcagatgaccttgccttttactcagagcaaatagaggccttcaatcttcatcccctatctccatgcagggaaccaccacctacttcacacactccccagagccgccacccaggaactgacgaaatcctctcccctcacctcctccatccagctagagccaagccctgtctcctttgtttccatcaaaagtacctaaccccttgagggcacccgctcctcttcattcccacccttagtaaacacagaaaagtgctgaagttctttctcgctgacctcttgttccctgaggcacagcccagactccttcctgggcacctgtccctttctgcccttgactctgctggcatctgcctgtcccctctgtccttatgattctgaccttcttgcccttcccaaatgccccctcctctcttctgtcagtctctgtcttcctttaacagatgctgactctttccgacatccacagtgggggcccctgaaaacacccaaaggtccccgattaggattcttaattcggcaaagacgaagattctcgtgcatgtggggatgggatgggtgtgctaggttccagctagcgtctgcatctcaggccagctggcccttctctgttcatcagcaggtactcttcatggtcaccgaacgtgtgaggcatgaaattcacaacgttgggggtaatatcagtgctattgcaaggactactgctgccactcacagcaccccttttttgagttgtcgctgtgctccagggctgtgctccaggctagcttggcttatctcctttcctcttgttcacccccactgtgaagtatgggtgagttgctagttaagcagagaggtgtggttgtgggtgctgagtagcagctggagaaggcaggaggctggatgtctggtttcatgaggctgcctgttgcatgctatggggctgtggaggctcttctagatgttgtaagccaaagtgtctctccccttcttgagtgagagccgaggattgtattttgttggcttccgtgacctagcacagggtctggcacctggtagtttcagtaaagatttgtagaactgaatcagctgcacatgccgtttgataatgtaggcagatttcttcagtggtcctgagctcctcccctctgtcttacaggaagggatgtcccaccccctttttaagtctcatgtcttagtttctctctgtggtcccatcctgttgtctcagagcttgcttatttttccagctctctcattggtttcttgtttgattataatcagtcctcagtctccctgctctctccgttccctggccttgactcagagcttgtggcccactccttctcctactgtcaagctttttcagagaggaacctccactgcctctacctctgggctcttcttctggcactagctcctcgtgcggcagctgatgctttctggaagctggtagataggtatcttgccacggactcagtgaatctgctcattgtaaaatccagtgcttttttttttttttaatagttcagtgtttaaaatgttatgagatttttaatcacacaagacagcattgtgtaataaacacccatatacctaccattcatattcaacaaatgttaacattttgcaattttctgcatatccttttattttttatttagaggttacagatacggtggcagcttctctgtacccctcctccatcccattcttctccctccctccccttcctgagcctggcatgagaccttctcaccaggttttcacactcacaccacttgtgtaggtggcccctgaataagagagtgtcttgtttgggagcttgaaagcttgcatagatggcatcattggacgtgtattccattctgccgattgcgtgactcctttgtgtcttagacccctccacattgattgggatagctgctggtcattctttttasctgctttatagtatttgtatttcattttagctgctatatagtatttatatttctcccacaatttcttaatctactcactgactttttttctttgtttgacccatttgcaccatttgtcactgttgaccagttttgagtgtttgcacagacctttactggatcccactaggcatttagtgttgcttcaccccagacagtgggatgcaaaggtaactggacacaccccttgctgggatcctctaaatatttgtctcctttggcttccaataatcatggttgtactaacagtaccagccagtattcatttagtgcatgccatgtcccagacaccatcggaagcctgtcgctcctttcatccccacaacaaacttatgagatagatactatgattatccagttttatggatgggaaactgaggctgagagaggccaagtcacttggccaagatgactcagctagtcacttggaggatccagatgggggctcagcattcagaccccacagccggagcctgtacccactgccgtgttagctcttgagctccaggcctcctccctgcctctgcccgcacttcttgtctgtgtcttccccaatctccatcattagcccaatcctctcctgcccctaagagttgctgtttcatctctagggtattatctttggtcttccttttcttatgatatcagggttcccttcatggccttgtctgctgctgtggccctagggagactctacacacaactgaacactagactgctgtctctcacccaggtctctggagtctgtgaatcaccgccctccatcgccacagcctactggatggctctgtctagatgtccagcgaatcccatagagtttagagactctagcgtcccgccctagtctctctatcctccatcttgctctgacttctgtgattatcctgtgtagtcattctcagctctctgtagcagtgtctgtcacacctgccctcttctttctgtcccctgccctgacatcatgcctcatgaaagcctgtagtggcccaggagcccctcacctgctctctcttgtcagaaccactttaggtttccagactgtcaccctcactgaagccaggtgtgattgtgttggtcctctgctgttaaacccttgggggctcccattgcacctggagtggtcaccagaggtcctagtgggatcgggcatgcttttcctggcctgacctcacttgcccttcatcctcccattctgccatctggaacttgtcctacttcttcagagtatttggccccagagttcatcaccttgcaccttagaatgtgctgtttgttctctggtcctggaaggccttctcccctgctacccttgctcagtggattcattacctggagctgctgtaacaacttaccacagactgcgtagcataaaacaatagatgtttcttccctctcagttccacaggtgggaagtgcagcatcagggggtcgtcagggtgggttccctctgggtgctctaggggagaatctttccttctgcttccagtctctggcggttgccagcttcttgggcttgtggccacatcacttgaatctctgctgctaacttcacatggcctctctcctcttctgtcagtgttttcttctcgtctttctcttgtaaggacactcgtgattgtatttagggcccgtccaggtaactctgggtgatctcaagctccgtaatcacatcagcagagagccaaagaaggtcacattcacagcttcagagatgtgatgcggccagatctttttgggggccatcattcagcccactaccctttgcagactcctaggtgtcttttggcatctgatactgagtggctgctcagggccttccccctccttgcctggcgtgcyctcccatccttgttgtcctccatgcatctcagtatgtcagctagggtagcatcatgcagcaaagcggcacgtgggcttgcctgttcttgtctgtagtcccctcatgctctcaaytcctgacacatgctggacacgcaatccgagtgtgacactttagaggtagcatgggccttttcttctcctagtgacacccgggtcctgtcgctgtgcccgggtggtgctgctggggcatcagctttcctcactcctggcagccagccccagtctcttccctttgcctggatgtttgcagtagctaccttgctgacctcgttgctcttggtcttttcattgtctccagttgacttggaacgctactgccaggatgatctttctgaaatactgttttcatctgtcgcctggtcagaagtgttaatgtcatattgcctctgtggcttgagtctcacaggctcaccctcttttataaccttttataacctgctgtcgacggatcatctgtgactcatctacacacctctggctcctgttattatttgcctgccttttcatcactgcggtgaattgcatatttcattattttgtctataagttggagttttatgtgctttcatttccccaaaaatgtctcttcagcttctttggacccctctgagctctagtgcttgctcattccatgcagactgcaaagaacaagtgctcctccaccttcttcttctgtggactgggggagcctttgttttctgtgggagcatccccctttgtcagtgtctctttcttgggccccttccctgtgcgttctgttgtaccagacataattcccatctcaggtgtggcatgccagggtttacaaagtcacaggaggttgctgcagtgttttccagtctctgcctacaaaggagaaaaggcacgaagtcatccattgattcagcagatcgttacagaacgcaaaattttgtgccacaggctgccaggtcctgagggtgcactggaagacaaaggataaatcagatgtggtacctgccttctgaattcactctctgcagcaggagagacaggtggcaattatgaaatcatacagaaaataaccctctatatgtttgtatgtatataaatgcagaaatgtggaacaagagctgtggaagaaaaagtccagggcactagtcgagtattgtttagggacctgttcgaacagggtccaggagcagaggggctttgggctggagcggaggagtggtagccagtcaggtagagggaatagcctattcaaaggcctcaggcaggaagacccagtggtcttcagggtgtttagggtatgggggtgggggtaggtaggggccggctcagccacccctgctcagtggggttggtcttgatcctgagggcrcttctgctcacttgtgcttcaccttctgcgtttttttcccttctgggtgagaaaatcaagtcaggaagtgctcttgattcttctggaacaagacctaattttccagcatgatgttgaaaacaaagtatgtcccattctcctgcagctctctgccccagacagtgatgacgaatataaagcagaagctgtgagcgtaagtccgtccagggaatgactgcccagcacctgtgggcacygtcccataagttgacttatacctgacatgaagtattacacgtgtttgattttggtcagcactgttctcgtgaacaaggtaaccagttactcgacctaggttggagaaagctcacagttcagccatgagcatgttttggaagtaagcatccctatagcaccaattgtttttttgtttttttttatacttcaagttctagggtacatgtgcacaacatgtaggtttgttacatatgtatacatgtgccatgttggtgtgctgcacccattaactcgtcatttacattaggtatatctcctaatgctatccctcccctctcccccgaccccacgacaggccccggtgtgtaatgttccccttcccatggaatactgtgcagccataaaaaaggatgagttcatgtcctttgtagggacatggatgaagctggaagccatcattctcagcaaactatcacgaggacaggaaaccaaacaccaattgttttaagaagaaaaggcttgagaaatcagagtgatttgggcttagcagcagtagctggcttagatttctgttggacaagatgctgagatttataggtaaatccttgaacctacttggaccctgggccttccttctcaaagaaacaaccctagtatgatgtgagataattttaggtggtacttagacaattaagaagaaaatttagcagacttgtgtgtctatagattaggagaagactaagataggtatgtaagcaaataagaagagtcactgtgaagaatgcagatgtggccaaacatttacaggcatttgggagatgctgtgttaaagtatttgtgcttctatcagtcaaagatgtgcagtgaaaggaatagtataaatgttcagtgtcttctagttaatagtctggtatccttgggtttgcaagattctgtgcccattgttaaatgattatacaggcaggattttctactcgcttctggagcccttgttcacaaaccagcagctgatgatccagtgcagacttttcctgccttcagatcaggatgcctccatttgtccttgcaccttttcctttgtggctcaaggggaggtcacaatgggccatcttgttttctttagctgctgctcctccactgatccatgcaaatgatgctgtatggcatgaccctttctgtttgccttatagaagcaaatagctccaggattattccagcattttaggaaaaatttgtccgtaaaggatgtaaaaattcataagcattaattatgagtataataaaatatacagaagatagttgttttcctgtttgggaaacagtgacgttagagaaaggaattattttcttttttaaagtgcagaaacattatacgccatagagctaaaaaattgtattacagcatcagaacatttggcaattactcttcatttatgtaaaagttttattcaactatgcgttaaaggtctggctttttaaactaatttaatttttgcatattccatgtgtttataagatgaatcaggctgaagaataattgattattaaaatccaaattctccagggttcttttataaatttcaagtttctctataagaaattaaatttgttttgcaaaatgaacctggataatatcatttagttggrgtatttggcagttgagcagtgaactttgccaactagatcttcttttccatttggaagttggttaggcgagtttccaaggttacgactgacaaccaaatatcttacccctaaagactgataataccatgaaaaataatgctaaaggcatttttgcatgatttttattttgttttctttccaaatactccattcttgtcagcaatattcctcttcttcttcattttttttggtagaaatatttggaaaatattacaagccttcaaaaagctatctgcacaaatcacttgcagaacaaattagttcacataaattgtatttttcattccaagtgagatgctggtctcattacttgaatggataggatttgaactgtggctgcgagaacagaagtgatcttgaacctcccacccaccatggcccagactgtgcttgtctgtttctcccaggtgttcctgcaggacctctgcttttcctcccgtggagatctgatgggagtggaatgtggggtgtctggtctggcccatgtgtgctttgctccagctatttccccagaccctggaggccaaggggccttggggggacttgccccttgagtaccagagagctgtggaacacagaaagaatcttctttttagctaggaaatgacaatgtgggtggagtaaatgacagtgtgagtatcattagccaaggaagagaaggccacatgtgtgctttgtagagctcccctaggaaggcagggttctgatttagctagtctgtaggtgataccccaaacattgcaggtgccagtgtgtatctattaggaggtgattcagggagctgttagctaaaagggtgatgaggaaagaagcaaaccgggctggtcagatgcccgatgtgtttgggggctctctgttgatccggatggtgtgaatattgctacatctgtgctgtacataaacacacgcctactcaaagcagtgccattttggaggaagtgcctcaactcccaaggagactgcacgtcttcatggataaaatacatctgttcattcgacttgtcactctcattagaacttaacaattagttgattctgatgccaacaactctagtgcatatatgattgggaaaatcagagataaccaactgcatgtgtcctgggtgttttagattgagttatgcaggacagcttccatgttgggacatgggtacatggaatcctgggaagggaaatgtgtgtgcattttcctttgtgaagaccttctagaaaccctatgcaatgttagtgactctgtccttgatgcagttagaagggttggctctgtctgtcttctgtcacttagcagttgagttgtgaaattctgttttgtttatttctccctcaagatggtgagcttcttggctcactgggctgcggtatctttgcaccatcagcacccagcacagtgccaggcccagagtcagtactaaataaatgttagttgttggatgaatgaatcggtaaaaactgcaagagctgtatcttttaattatatctagacaggataaacaggccaccagagaccaattataattcctcttgcttgcagggacgccattagcattccgagattataactcattgtcagaagactatttttctctctcaaaactttttcacgttaaggcttcctcattttttgtcatcatttctatttttaagctaatttttatttgtgcacttatttaagaagaatctcttggttatgtgctataaagaacagttggctccaagcaactaagtgaagatcgtcattccatacaagtggttcccagggccacgggaatataatttcttgtcactagtgtgctgacttttaatgactctggatttgttttatactgtatagtaataaggtcatgcaggtgtggcagatggagaggggtggatggagatactgggagtgctttagttgcccatcaccctgcatacggaagcctcacatcctcatttattgtggctgtcactttgtacaactctgctaagcatcacatcagaaatatgtgtcctctctgttctgaggacacaaaccttttccttatttgtgttatgggctagtttccccgttcgctccacccccattggttttctttcccctcttcctgtatgcaaattccaaatagaatgatgggtagattactaacccagaacctttttctactgtaaataggcagtgctgtgtatatagtgagaataacagactttagagacaggaagcccttcctccccccaatccctgcctttctccatcccttcctttcttctctccctacttyggtccttcactcccctgccttaaccttcttccttccttcttttgttttttcctccttttctttttactgtgttgggggaatggaagaattctttcacaattttgtttttggcaacttttcatcttgtttcaatttcaaacttgcaagaaagttgcaagaatagtagtatgaattcccctatacctctttctggcttctttagtaatttgtatytagcttcatttattttatcattttttttctcttctcctccatttctccttctctctccacacatacagacagatgcatatttactgtatttattattttctgagacatttgagacttagtcggaggcattgtccctctttatatctaaatacttcattttttaatttaatgttttatttattaaggacaaacagcagcattcatctaaatacttcaatgtatatatcctaaaaggaaggaaactctcttatataaccatagtacaatgatcaaaataggaaatttaacaccgatacagtgctaacgtcatagccacagttcatatgcaaacatcgccatttgcctaagacccagtccagggttacttgctgcaatgagctgtcctatctctttggtttccattaatctggaacagttcctgagtctgtctttgaatttkgtgacacttaagtattggaagagtactggccacattttttttgcagagtgtctccctgtttggctttgcctgatgtttccttgtgattggattcagattctgtctttctggcaggagtatcacaggagtgatgtattcccagtgtgtcatggcaggaggcacaagacttcagcttgtcctaatattggtgatgttaactttgatgacctaatagatagatgtggtatctgccaggtttctccagtgtgctcttttttccctctggaagtaatgagaattaccttgtatttaagtatgctcttctccgtcagaccttcacccgctagcgttgctgtctattgacaattctggttgacattctactgtgctgccttctccataatttgccaccattttgttgaggattttcatatctatattcaagagaacaattttcttttcctattatgtctctgtcagattttagaatcagaattattctggcttaaaaaaatgagttgggaagtattccctccttttctattttctgaaaggttttatttaagattggagttatttttttcctaaaacatttgttagaattctccagtaaaacctctggtcctagagttttctttgtgagatggttcttcataacagatttaattcagatacagtgctgttcagatttcttcgtctgtgtcactgggtaagttgtacatttcagggaatttattaatttcatgtaagttgtcagatttattgggttagacttgttcatgatattcttctattatctttttaatgtctgtaagatctgtggtgttatcccctttcaattatgatcttggtaatttgtgtttttttctctcttgatcagtcttgctaggggcttatcaaatttatttatgttttcaagccaatttttggctttgttggtttttttcacttatttctttttcattgatttctactgtttattatttccacccttctcctttcttgagttgtttgcttgtcctttttttagctttttaaagaggaaacagtatttttaagcctgcattcttttccattttaagcatttaaagctacacatttaatgttaatgtctatgtgatatattaaccctttcatcattaagaaatgtctttgacagtaatccatattttataatcaattatgatagtaatataaccactctaggatttttatacttattatagtatatttgtttatttttttactctcaacttacatgtctttacatttaaagtgtttgtgcttttgttagcatctagttggatcctgcttttatatccagtctgatagtttctgctccttaattagtgtgtttagttcatttatatttaatgtaattattgatatgtttggttttattactgccatttctctgtctgttttcatttgtctcatctgtttttttgttaattcttttctgttttcttttgggctaatgaatgttttttagcattgcattttaattcctctattgaggattttcaaaaaatatatcaccttttgcaacagcatggttccattcacttgctttcatcctttgtgctgttgctttcatgtatattacattatgagcctgcgaatacactgtgttaggccattcttgcatcgctatgcaggaataactgagactgggtaatttataagaaaagaggtttaattgaatcatggttctgcagactacacaggaaacatagtgccagcatctgcttctgaggaggtctcaggaagcttttactcatggcggaaggcaaagtgggagcaggcacgtcacatgatgaaaacaggagcaagagaggaagtagtggggagggaggtgccacactttacaacaaccagatatgcaagaactcactattgtgaggacaacaccaagcaataagggatccacccccatgacccaaatacctcccaccaggccccacctctaatattggggattacaattcaacttgagatttggtggggacatatatttaaaccatatggtacagtattttaatttttgatttaaagagttacatcttttgaagagattagtaaaaaagaaaaaaatacagccttttatatgcccgtttttgccatttttggtggttgtcattctttcctttcctggatatgagttatcatctggtatcctttcccttaatgcagaagaacttcctttagtaccttttgtagttcaggttggctgatgatgaaatttattaatttttgtttatctgaaaatgtctattttgcatttatttttgaatgatagttttgtggatgtagaattgtgagttgaaaagtttttttgtttcttttagcattttaaagatgccattctgttgtcttctggcctcctttgtttctcatgagaagtcatctatcatttatattgtactcgtatatataaaatatccctttttctctggctgctcatgagatttttctctttacctttggatttagcatagttagtatactgttttgtctccattgaacttcttggatttgtgtgttaagcctttcaaataatttgggaagtttgggctattgttgttttaaatacctttttctgtattctttttctcctttcagtttgtgacttagataacacaaagttgggacccttgatgttgtcctacaggtctttgaggcattgttcacttttctttaatcattttttctctctgatgtttagatttgataatttttattaatttaaaaagtcattgattctttttttttacttctctccaatctgctgttaggcctagccagcaaatttttaatttcagttattgtactattttgctctagaatttccattttgatcttttatagacctttacagtttctatatctctatcatatagaaagtccctgtctattctttatgcattttttccttgtaattcttgagtatatttataacagctcctttaaagtccttgtccggcccatgcaacatttggatcatcttgatgttggttttcattgactacttatattatggatcacttttttcttattaatgcatgagtagtgatttttgattggacactggacattataaatgatacattgcagagtccctggattctgttatatttttctaaaatgatttttgtcctaggaggcagttaccttgattaatctcyagctccaaattatctgccttgtgagcagaagctgaaatctctgctgagtttgtttaatttctgacgctgctttttttctgggtcctctgggatccccctcacatatatgtagtttagcagttagccaaagatttaagcacattttatgcacagattttggaccttgcttgcaaatctctcctgttgcagtgtatcttttaagagtagcccctcttccagtttctgccttttggttgctttccgctgctttcaaatggtgttttttttatgttttgtcaagattctataatttttagcttcaggagggttagtctaacttagactttgctattaccagaagtcttggttcttttttatagtttccatttctttgataagattcctaatctgttcattcattgtggccctgttttcctctttgtacttgagcatatttgtaatagctgctttaaattccttttaaagtcttctaattctaatatctggattttctgtgggtgttttttctgctgactgatatttttcttgactgtgggtcacattttcttatttcttctcatgtctatagatttttcattttctattgtattttgttgaaacattgtagaaactctggattttgttgtttacctctagagatattgactttgttctagaaagcagttcagattctgtttttcctgtagtaggcagcagctgaaacagctcacttctttcatccttaagttactgtttctctatgaacctcaccatctcccctgtgcatgcccagttcagagatcagctaaggattagggtaagatttaaccacagattttggagctttcctttctttggctccctccttccttcacagtaaaactgtagctttaaaaaatttatgtatgtatatatgtatttatttcactagctttagggatacaagtggtttttggcaacatggatgaattgtatagtggtgaagtctaggatattagggtacgcatcacttgagtagtgtacactgaacaccaataggtggtttttcattcatcaccccattctgaccctctccccttctgagtcttcagtttccattatatgactgtatttgcctttgcatacccatagcttagcttccatttataagtgagaacatggggcatttggttttccattcctgagttacttcacttagaataatgtcctgcagttccatctaagttactgcaaaagacattattttgttcttttttatggctgagtagtattccatggwatatatatatataccacattaaaatatatatatatatatatatatttttttttttttttttcctttttttgagatagcatcttgctctgttgcccaggctggagtgcagtggtgcaaccttgggttactgcagcctcaacctcctcggctcaagtgatcctcccacctcagtctcccaggtagctgggactacaggcgtgtaccactacacccagctaattttgtttagtttttgtagagacaggtctcactacccagactaccacattttctttgtcttctcatcggttgatgggcacttagattgattccatatctttgcaattgtgaattgtgttacaataaacatatgcatacaggtgtctttttgatacagtgatttccttccctttgggtagatacccagtagtgggattgctggatcgaatggtagacctacttttagttctttgagaattctccgtaatgttttccatagaagttgtactaatttatatccccaccagcagtatataagcattcccttttcaccacattcatgccaacatctatgttttttgactttttaataatggccattctggctagggtaacgtggtatgtcaatgtggttttagcttgcatttgtctgataattagtgatgttgaattttttttatatgcttcttggccatttgtatatcttcttttgagaaatgtcctattcatatcattggcccacttttcagtgggattatttgtttttttcttygatttgtttgagttccttgtagattctggatattagttctttgttggatgcatggttcgcaaatattttctcccattctgtgagttgtctctttgatgactatttcttttgctgtgcagaagctttttagtttaattagatcgcatttatttatattggtttttgttaaatttgcttttggggtcttagtcataaattctttgcctacaccagtgtccagaaagagtttttcctagattttcttctataatgtttatggtttcaggtcttagatttaaaatcttgagtagatttttgtataaagggagagataaggatccagtttcgttcttctccatgtagctagccagttttcccagcaccatttattgaatagaatatcctttctccagtgtatgttttgtatgcattgtgaaagatcagttggttgtaagtatttggctttatttctgggttctctattctgttgcagtggtttgcttttatactattaycgtggtgttttggttactatagccttgtactrtaatttgaagttgggtaatgtgatgcctccagatttgttcttttagcttggtgttgctgtggctattctgacttttttaattctatatgaattttaggattttttttcctaattctgtgaataatgaattgatattttgataagaattgcattaaatctgtagattactttgggcaatgtggtcatttttatgatattgattcttctaatccatgaacatgggatgtatttacatttgtttgtgtcatctgtgatttctttgggcagggttttgtagttctgtttgtagagatcttttacctccttggttaagtattttatttttattttttgtagctattgagttcttgatttgattctcatcttgctcattgttcgtataaagcagtgctactaatttgtatacattggttttataacccaagactttactgaattcatttatcaaatctaggagtcttttggaggagtctttagggttttctaggtatgagatcatatcatcagcaaacacagatagttccttttttctggttgggatgccttgttttctttctcttgtctgattgctctggctaggacttctacctgttgcttttgcttgaggtctagctaccctgtatagccatgtagaacgggaagtaccctcaggcaaaaagcagcataaatgcaaaatttaatcttttttttyytttttttttttttcttgtaagggtctagtctttagtttctccagaatgtgatcatcttccagtgcttaccatgtcttgctgtcactggatgactcacctccccactgtttgtgtttagtcattctatttaacctcttgcagcatttccccatccggaaacatgaggataaataatgcccatgtcataggattcttgggaaggtaaaatgagccaatgcacatacatttttgtttgtttgtgtattgggcacaaggtggggacctggcagattgtaactcttgagcttctgacaaacagttacctgagtcaaactggagaaatgttgggccttctgttgatcttataacttgacaaaactcaaaagaaggtgttttttatttttccttcttaggtatgttgggaatattttgaatattggcttttggaatatatctttagtgctacatgtgacttacatgctttgacattttaaatgattcgattttttwaaaaaatttatagataatctgcaaaatggcttcaatgctgagtaagagtaccgttgaacgcctgctactcccccgattctgtgaactgtgtggtgacaggaagctctttcaagttcggaaggtaggaatgtaagaattctaaaactcttaaagttaaaaaaagttcaaaattgatttttctaaaggttttggacttcttcagtagacatagtctgggggaaaaatgtgtccagtgtgaactatgtaaggaaaatatctgaacagcrttgccagtttttactgcagttaagaaatgcgtagagacctggagataagagtctgtatgactagacctgttgccctcaggcacagggtgagagttaggggaccttgctggtttatggttagatgcccaggcttgcaaggtctttgattatctgtggtgatttgatccagaaccttcttatctttgctataccttccaaccccaaattcccttttagtcacttgtcacttggttgtcaaattcttccttttgaagttcgttaccatccttccctaaacagcctcaccttgcaccttgctgtgtaactggccatcacccctctggtctctgttcatgatacacaggcagaacagcaggtctcctttaccatgcagggaatgttaaggggcctcttttgccttatcgctaacatgcattctgtatcaagatcaattaggagccagaaaatcttagaatttggcaccttattgtaaatcttctgtttttgatgcaatggaggcatctggcgttgtgctgtatgggcgatgggcttgggaaaggctcgttagctgcctgactagcggggtaattgctctcaaagttcctgcttgttagtttttacaatttgttaagacaaaaagaaagataagaataatggatatgcctttygcctttttaaggtttgtgctgcaaattttggtgatatttgtcatgctgttggacaagaagccactgagaaatttttggtatgtgacattttggccaattgtaattgttgatttgcttcttaatgcactttcaaaatcacttaagttttgtatttatgaatggcagctcaattttgcatttgttaatttcaaatktcataacttctgaagcyaacattttcctaagcattaggtagctggtctgtggaatgggctggaagcaacccccatcttttttccggtgggcttggctgtctcctccttacaagtcacttttccctgccttcttctcactgtccaagttgctctctctcttctctctctgctgctctttytagaacaccactctaccacctcactcctgggcctcaaaaccattgggatttttttcttggtttacaggttaaaatctagagccttctgggccttccaggtcccttcgtagatgccttttctgcctcacctccagtcccctttctcagttctgaacactaccctggcctyggtgggtctcacctctggccatatatctgaagcctgggggggcccaggcatctgcrtttttgataaagtcccacatgattctgatgcatagcagagtagagatccacttccctaagcagccaggtgacttcagcatccttgagacttcttgctctttcgtacctctgggcctgtgctcactaagagcatcttccctgcctggtgggaccctcctcacacttccaacccagcttgaattgcctctgtgaagttctttccttgtctaggctgacctacctgcagtgccagagagaatcagcttctcccttctcagcttcctggtagcatttgttcagaggagctgaggagcttcttgagggcagggaccgtgttgtgttcatccttgtttccccagtgtctaccccgtcagtgcccggcccctagagaaccttgctccataagcatttgtcagttttatttgacagaatatactccttgtatgggtgagattttgacctcaaaaagtttaatctttaaattgatttttaaatttaagttcagaagctcattttattttgtttaaagtataagccatgtcagcacagttctaacccaagaataatttttaatgggctgttgctttgaatatatagtgaatttttttttttttttttttttttttttttttttttttttttttttttttttttgtgagacagagtcttgctctgtcacccaggctagagtgcagtggtgtgatctcggctcactgcaacctctgcctcctggattcaagctaaggctggatcctgccttagtctcctgagtagctgggattacaggcatgcaccaccgtgcctggctaatttttgtatttttagtagagacagggtttcaccatgttggccaggctggtctcaaactcctgacctcatgatccacccgcctcggcctcccagagtgctgggattacaggcgtgagtcaccacgcccatctacagtgaatgttatcttctacttaatatatctgaatgaagaatggcagtgagtaacatgctaatcatttgtaggtagatattggcatgattatatcatattcccatttgcgaagcattttaggctattttacattaggatattaaaaacaaagcccttttaaaggatacactttaaaaggggatgtaatcatgacctttatagagatatgaaatgaacgtatttcaaagattttatttaactcatttattagtgaggaaaaccagtaagatattacagccagtttaatggagaactcaaagtactcatttatagtcagagcaaggaatatcgaagtgaacttacaaatgaattcaaaactggtcaatatycagggtgataattgattacatttcactggacacaatttgcatttctgttggcaggaattatttgcattactatcaggttttagcaacctaccttctatcacttcagagttgtaaaatagctaggcaaagacagtgatacctgggtgggtgagttagttgggacatctactgtttcagagtctttcacaatcttctctacaatttacctaacaaatatcggtcattctgccctttttgggattttctctattatctgttaaaggtaaccaagtcatttactaaaattaggaggtaaaagaaatgtttatttcttccacttctcataatatctgtttgtttcaaatgattycttttagaccagtatgtattttccttttccttgtcattaatttctgcatatgccttcactgcttcattaaaataggttccagcactttgggaggccaaggtgggctggtcacttgaggccagaagtttgagacyagcctggccaatgtggagaaactycatctctactaaacgtacaaaaaaattagccggatgtggtggcacatgcctgtaatcccagctactcgggaggctaaggcacaggaatcgcttgaacctgggaggcggaggtttcagtgagccgagatcgcgccactgcactccagcctgggcaacagagtgagactctgtctcacaaaaataaataaataaataaataaataaataaataaataaataaataaataaawaaaacaggttctgctcttcctcagagtctccgattggagtagcactcttttgtttgttttggcagatcccaaagttctttgagctctgctctgatgctgtttggggcatgcggaaagcctgtgcagaatgcttcacrgctgtgtcgcacagctcctcccmtggggtccgcagaacccagctcttcccgctcttcatcagacttgtcagcgacccctgccgatgggtgagtgccagcagccctgtccagacaccagcckctgttgaccaactgaacagctayrtctggcttccaggctgggattcacttctgggcttgtaactttgtattttgtcccttcagttactgattgccataatcacatttagaccttgtgaggtctcagggaaactaaaatctcaaaagcttggggtgagttaagaaggtgaggtacaccgtaccatttatagtgaacgaatatcatgaaaatcataattgagaaagaaaaaactatgtaactgaactgttaccttttctgttgctatcataaacatgtctgtaatgattaataaggcctgttcaaatacttgatataaaatgtattattcatataaaattaatattctggaagaatgaaaacagtataatggggctaaatttttccttactttctgttgaataatagtatttggaatttagggaatgatttagaaagcaataaatctccatagatgtaatgtggtggagagtagcttgtgtggtgtccaactatctgtttcagcctgggctcagtcctggccaccgccgctggccgatgctgcgttcattcactgcactgttctttctggttccaggtgcaccaggctgccttccagtccctyggccccttcacttccacctttgcaaacccctccagggctggcctttatcttcgagaggatggcgccctgagcatctggccactcacccaggatttggactctggttttgcctctggctcccctgctcccagcagtggtggtaacacttcccctgccaggtatgctctggctagggtcaccaccaggaccctcgatgtaccttaagcacccacctaaaatttcagcaattatcttgtctcgagttttagtagtgaccttctgggcaagatggaatattagagctttaattatgtaaagaakcaaaaagtaattgcaataatgattttgaaacatgactactgggttataaataatgaagctactatgtctcctaaatttagataaaatattcattgagattagtgattaaataacctataaagaacattttctcttactttttgatgaatgaagttctctgggtaatttacttagggaaaaatgtgaagtctcccaaatgtacttttttggaggttgggttacatgtacataaaggcgacactcctgaccaacagcggtagaccctccagtgtttgctaatatggcgctggatcttggctttgtcatgtctttcctctgaggctgatgcgtatacaccagccatcctatttgaggtcgtttgtaaatgtctctccattgtcgctagcgtgcaggcatgtgagagtgggtaactgatgcctcacagaatacaaatccttccgaggttggcccatcctccctccatcccacttccatcagagttcattgagctcctgctgtatggcaggcccatgggcagtgtcttcctcaagacctcaaagtggttaacaaatagccacctcttaccagtttcagcgccttttgttttctaatgcctgccctctggtggaggtactcatgagcaggaaatggatgaaatgtaccgaaggtgctccagcggaagtccaggccggctcagccctggagtatagtggagagaacggctgaactttcaagtggtgttttcagtgcccatcatactcccggcggggcagtgggggttgacaaacctcttatcctctcgtgagattttagtcagctgacaccaggagacacaaagaggggccagtggtcagctaggaagtagaggactgggtgaggatgtggttctcatgtttttccctgtggctttcagtctgttacacagtattaaaagtttgcttccctcagtttaactcgttcagcaaagcctgtgcggagcgagccagagctacctgtrgaagggacctcagcgaaaaccagtgattgcccacacagcagtagctcctctgacggcccagcggaaagccctgtggaaagctgtgtgtcggctggagctgagtggaccagggtttccccagagaccagcgccygctcaaagctttctgacatgaatgacctccccatcagcagctaccctggatcagattcctgggcctgcccagggaacactgaggatgtgttcagtcattttctttattggtgaactcctctccctgacataagcaaggacttagagctgcttctgagtgaggctgggcctcaggaggacgactgcagcagacctggggttgtgcacaacagctgtgtggcmcggagtgagattcagaaagtccttgrtagcttgcaggagcatctgatgaatgatccagatgttcaaggtaaatgttgttcattgtcattaaagagaagatgggatgtttctgtgtcgtgtgttgcatttcgccacttccttcttccccaggcatgtgtactgacgcatgtgcgtgtggacctgtattcatttacactgtatrcmcattgagaggagagacttgttcagtctcagtacagctcgaaaagtcagaaatacctctgtgcaggtacctatgcaatgattttgctttctgattttgcagatggacgtgcacagagtctgaagtcagttctgataggaaagtggatagtttgtgggcatgtctgtggcaggggaaattttattagctccttagacacactcttacatcatctcccacatagaatgccctttctagttacgaacagccaagggtggcctccttttggagcctattaacrcagcccttagctaaactttaaggttcttgtctttgtacaggaaggaaaagcacaactactgctttggggtatttttcattttatgactcgtgctcccactgagcatctgatcagggatctggaccttgcaatccatatcccattatcatgatcttccttctctgcacagtgctatatttgtattcttccttgcattggagaaattggaaaaaaacatcacttgctgctgttgctgggcagagatttgtgaagctttcgggaagggaactatgaaaattcagttagccctgtgattattctttatccttaaatttatgaaggaaattaaatcaatgtttgctgaaggaatgggcacacgtaacatatcacttctaatagctagagacaaaggtctgtttttggaaaacacattactgagctgccttaatccccagtgtaagacctggactgggggctgggcagtgatgactgtggcccctgaggcccttgtgatatggttaaggggattgtgcaggcagccaccctgtggggcatggcgagggctcggaacrgaggggatgcgatgtgtagaggaaatgtctgggagagaccttacatagcaggtgacatttggcctgggctttagagattggctgagaacccaccattcagagaagtcaggggatgagtttcagaaggttctttcagttccctgaaatcattatttgtaaaatcttgcatgtttgtgcatacttaatttctttgtaagacaaggcccatagctttcttcagagctcaaagggatctatgatccccgaagatctagaaataagtgatgcattttatttgtgaactggccacggcaggcaggagatgtcactcaggccattgggaagggcctggtgtgtagcactggagcggtgggacctgtcctgggcacagcgcagagccagctacaagctctcagtgttttgatgaatgttggagtccacgaaatttaattaatagaagcaggatgcaggaagtaatatgtgkgtgtgtgtgtgtgtgtgtgtgtgtgtgtgtcttttgggaggttgaggatactaaaacattcgtttatttttacagaaaggtatgtgaaatatgttatctttactgtttagatagtctcaaactgtcatactctggacagaaagaatgggcagcctttggggcttggtgagtgagagcattactcatctgtgtgtaaatggatgtattcatgcatgggtgtgtgtgtgcacatgtatgtatgtgtatrtgagcaggtagccatcctgctttataaatgggggagcaggatacccttcactgagttgttggacctcccagtcatccttgttcagtgataccatgctgtctttctgtgaaacatggtggagtcacttgggtttttccgaattgagacttttcaagttcaggtttgatgttctgtgcatggctggcatttagttgaagtagttaattgttagtggccggaaatatcaccaccttgccgagagcttgagactccagagcattgtcacttcagaacagatacgtgtcagtgtagtacacccacaccatgtagcttagtgcagactatgttgttttgaagacttctctgaagtaaacccccacaaaccaaataaagttgttaaatttcttgaaacttctcttcctccagctcaagttcaggtattatcygctgcactgagagctgcacagctcgactgcgtgaatgaagctgagagcaagccaacagcaggcctaaaggaagtgtccatttcacatcccagctctgcctctgacaatcagatcgctctggcggcctcatcatctcaggatgagctctttgtggccaggatattacaaagcccagtaagtatttgccgtatccctcagccaccgaggatgtgacagaaatcacaaagcagcattttctcttattaatatatcccagcagagatgataaatggcaaatttcattttattcttaaggtcatgttttggataactagacaaccaatcaatcaggtgattgatagtgccgacgcgctcccacgaagacgggtgggcaccagaaagtaccttccctcttctccagagatgacaagaacttcttctttggggaggttaaccatgtaaatgctctgtgtcactgctaacagacatcaacatcttttaataatagtggagggtgaattcaggcagttcctggaatttcaagtggacgaggcctcccagagcagctgtcacaccagccgcccatttggtaggcgctctggcatacgtggatgctccagtgctggtcctggcatgctgtttctctttcttttgaaaaagcaccagtgacccccttcctcctgtgggtggaaccagccccttgtgagwccacggccccaaagctggagtgaagaggggcccatgatttatttcttcaggtttctccagragcttgggtcaaccccttgtagctggaggttcttgagctgtcctagtttctactaagcttccacttggaccactttaagttggggtcttccacaggtaggggggcagaatggaggattaaaatgagggaggagtctgtggtcatacagtcattgggatagcaccgtgtcattatcatgtgccatgatggataatctcttcaatctcatggtctccagggcctaaataccarttgtttctctattcatacagtttagaacttgatttcagtgattaacacctcccttaccccttaggcctgctctaataaagcaaaataaaacattttagaactcaaacataaaatgtgtaggagttggttatctgtgattaataagaaatggggtgatatcctcttctgctggtttgttgctaaaaaaattagcaagaaagctcattattgtcaaccttgttacctagagtgcaaaagttgcaagtgttaagtagaagggtgtgaccacatttaccttggtggggatgtgatagtatttggacttctttatcatagaggtgaaaaaaaaaaaaaagaacagattcctccaggctggggcttttgagttgcagctttaaaagggtttgtgtaatggagcctttgttttatggtgtgggagggcagagcccttgaatttgcggcttgactccaagatcctagtgggattaattaggatgcttcctgtcgcaaaagaagggagaggaaataaaaaactccaagaaccatgaggaaaatgttctcttgcacaagacaagaggaagaagtgctgtggttgggcagcttctgggctgctagactccatacctttggtgctgatctgtccacccttcccctctgctgtggtggcttttgtcagcatgaaatgcccagtggaaggcggggcctgtgtcttcccacttgtctcttttgaagaacaaggacaccccaggcgggaaaccacctccctgccctctccttctgcctccctcttcctggccacagtcacggtgtgcattcatgggttgagcatggtgaactgggcagaaacatgggagccccctgagtcgggatcctgctagaaagaaggctgctggatgctgagtggtgggtgcacaggtagccagccagcatggtgtcccactggggtttggggaactcacaataccttctggaggtgccatgacttgtggtgatttgcttaagccttgatttggctcctggattaagtgctgcacatatgcttgcactgaagactttggaataaaattaatttctaaagggataatagtgattctaatgacacatcttgttactatatgtgaatttattaataataagaccacaagaaattgaggtcttaggtttttataccaaaatatttctgttttatcatgtcctctgttaaaataaatagtacatatcagtgaaaaccttgggaattgaaggttctggtggcgcgcctcagagcaaacgaagcatctatcggtgtgttaatcgactttcctggatcatayattgagctgatttgtcagaatccattaagctggtagacagtatgacatttcaagtgcaacttggaaatccatgttatggttgaaggagaaggtcaggtccatctcagttaatgttaatcaacgatcagagaccaaaatgtcaccattgaatgttcttgttcattttaattgtttacctaatgtaaaggtttatcagcgaacatcaggagtgtttgtacctgtgaaaatctaggacaattttctgattaaatactcctgtatcagccacatcttttctctcagattcattgggttccccagcccccatcctctttcagggacccaccattgctgcaatccctgattaccaagaaatgctggaggtgctggctctaccacttcttgcaaacctcacccttctggagtagtctgtgccttaaacatgtgaatattacttaaaggtgttggttagccataccagggagtccctagggcataaggaatagtggatgcaaactcacagggttgctcctcagtgctttcactttagcctttgtatttctgtaaggacctccagcagtcttgaaattaaaatgtatgaaatcaattttccttwgcacttaaaagaactggtttatacagtatcatatgtaactgtgcaaatgtaatttttaacatctggaaagataccattgacttcaaggaaagcttttgccttggcttacagaagtaatttctggcattgaaaraggactctttgaaggggaagtgacaggacagctgcttcctttggagcaaattggtaacatgtccaatcaactctgtaggatccaggtggacccaraaatggaaccagtgaccatctggagactgaccagaggcaggatcccaccccacttgaagagaataaatctaaattacaggttcgtttctttcggggkcgggggggcggggaggcaactcaaaactgtgtattttcttaaagttaactttaagaattggaaccaaatattttttcttctatcaatattgattacatattttaattcatatttygtgttgctaattgtaaaaaattaattgtaaggtagtgtttaagcttctgaacaatctataatagtgttttcaataaagcaaactaatatgagaaaaaaataagacatctaacactgatttgattgagttctatctcagtcaagcacagtcaaacatagacgtgattatcagagtataaggtctcaggtgctaggttcttggggcagttgtaagaaaagagaaggcagtctccattctcaagagctggatgtaccagcctaagcagacattgctgtctagactgtcctctatgatatcaaatattgtgccaatcttaaraagatgagttttgggtgttgctttcacttcaagcaaaattgaaaacccactctctggagaaaacagagttggcaatctgaagccctttggctttaggaaggcctcatgttcctctcacatttctgctttattgttttcacctctaaactccaaactccttgtttttcatgagtattttcctgcattcacgatggcctcctttctctctcatttcccaggatgtaatamctcagccgctgctagatcagtatgtgtccatgactgacccagctcgagcccagactgtcgatactgacatagccaaacactgtgcctacagcctcccaggggtggcactgaccctgggcaggcaaaattggcactgcctgaaagatacatatgaaacactggcttctgatgtacaggtaaaagcctttccagaggcaygtgcagaaagagggtgggtcattcattagggagaaaagggaagctgcagcaaggcttattggcctgaattttatgtggatgcaaattggcatgtttactggtctctgatgaaataaagctttaagtggccaacacctggcagtattcattttgctccaaaaatgccatgtaagatacggaagaggttgaattgcacttgcttgtcgtgattcgtgtgtctgctatgcacccctagtggaaggtacggcgagccctagccttctccattcacgagctggctgtgattcttggggatcagttaacagcagctgacctggtgcctatcttcaatggatttttaaaggatctggatgaagtgcgaataggagttcttagacacctgtatgattttctaaaggtaggaagaagggttaaaagcaaaaaacaagcctcctctctccgaatcaaatttgtgaagccctggatgtctatggtgtcagtgaaaaaaacaatgcagtttttagctttctttagctgaaatgtaccatccataatcttaaagtggatgttctttcagtgatgggtaaatattttaaacttttttctcctcattttcctgtccattagagttttaattctgtggaagatggtagacacaaagcctagcacactctttgcaaaagaagaaatcaaggcccccaggtagtgacctgacttgcccagaagtcacccaggggaagagcctgggctgaagtccaacctctgttctgcatgaagcactttttctgcaagtcgctgctgcttcccttctggcttccccccctcccccccaaacgaacgatgaatataaaaaataagagtttaaaaatgacctagagaaactaattactctcatccacatgaccaagagctgcccttcacggactctggtgtgcgctgctccagctgagtctctcctctcctggtgccgagcagcctcgctccctgggaagcggcagtggcacactgtcttccaaacacacacagactgggtttttgtttgtctgtttttttgtttttagataggaaattactaaagcaggaagacctcaggggcattcagaaatacataataagcacatgtcctagccaggggaaaaggttggaggtgttcagggatgcatttgatgtcagtgtacagcagtgttcattcgcagccacgctgcgtgatagatgacgaggtgtaggggaaatgcaaaagttsttgccagtgacaaatgtataattggaagtggaataaaagggggcatttggggtcattttgaaggattatacatgtttgtttatatatacatttttaaaaaatagttgcttcatgaagacaagaggagagactatctttatcagcttcaagaatttgtagtgactgataacagcaggaattggaggtttcgatatgaactagcagagtaagtaaaaacatatttggggatatgagaaagcaaactagatggaataaatcttaattttcttaccatataattgatttctaaagcagcagcaatagtgttcttttagataaagagattatgtttttattaaggtataaacagaattccaaaaaccctgagttacaaataccacagtctccggggagacattcattttcagatgaagacagggcttgagtcactttcgaattagagtgttctgctgttctagaaggcaatttatttgaaccaaataaaagatgaatcacccactcttcagtgttttcctattaatcggagcagtttttaccagagctttcctgaacattctgagtgtggtcctctccgtagggtacagcatgcttaatgccctttagctactgtgggagacaggaaggggtctaacccagatgagatgattatgaaacaaaaaggttccccaaggtggctcctatctgcacatcattttgtgcctgaaggagttatttaattctgtcttgagctggcaaaaggaatgttccaggctttagtgatgatgaaagggtggaagcatcagtttaaataactccccttcctaaggtatataatgtgcctttcacggtgtggagggaatttgtttgtggcagttgttgtttgggttttagtttttaccttgttttcatttcggtgtctttagttttcatttttctcatccacaactagaaatctctcaaataattgtcttccctgaataaattcatcaggcttttgcagctattcaggatatgatttggctgatgccaggggcaaaccgaaagcctttctctttgctgtggtctttaatcattctgcttaatttgagagattgaggtttcagtcattttaccatgttcccagcatcctgttctgagtcgagaaaaacaggcccacgttttccatgaaagcagtgcgacctctagcggcggcgcacgggaagtaggcgcgctcggtgcccggcggggcttccccgggtggttgcgcggccccagtgcccgaccacgttatctagccccctacgcgccctatctcccatctcccggcttattgaagccacagcgactgatatgaattctgtgctccggtgcccatgatattggtatcatgtttttgaaaacggtgctttttgatatgaaagtattcaccagcactccgggcttctggttctaacttcctccccatctctttttcatttcctttcgttgcctgggtgaaagcaatgtcatttattttcatgcccttctccccatccccatttagaaagtagtgaaagctttggtagtgggttttcgcagccagccgtctcctgcatgcttttgtctttcggagtaaggagcacgcgctcccagttctctccaagcggacctcgctgcagtgaaaccacctcgtgctgccaagagccgcgagcaggagcatccggttcggtttgcagtcggagaaacgccggggcggtcgtgcaatctcagagtgttcgcttgatctgttgacctttgtgaacttcaacattctggctatttttatgttatctgatttttaaagttttatgtgcttttcaactgataacctaaaattgaaatattaaatctgtattcataaatttctcagcctctattttacagagtttatttcctttttgtttgatttgtatgtgtgtgagatgaagaattaaaattttgttcacattttttttgcatggtcattttgctcagctttctgctgttggcattttactgaagaccgaaatcttgctgggtcttttgctgttcatttcccagcctggctatttttatctgtaagatgaaataacagtaaaaagaaatcaataattttktttttttgcccaaaaataatgttttttttgttgttgtttttgttgttgttgttttccttttaatttcagacagctgatactgattctggaactctatagtcccaatgatgtttatgattacctaatgcacattgccttaaagttgtgtgcagatcaagtttctgaagttcggtggatctccttcaaactagtaaggaatcagggcatttgctctgtgatttttacaaataggaatgttgatgtatcttccattttaactcttttaatttttctgggcttactttgtcagctaacctatgaaactagcttttaaaatttgaaattaggaactatattatagttttatcaatttgtaggatagctttttttgttatatgtttcagtgacggcaattgtggagtaatccttttatatatgaaactctttaagccataggttagtgtttttaaaatacaggttgatttacagcttggttttgtagaaaaatatttagtgagcaaagactctgctgtagaaaagctgatcctatttttttatgtgggctttacaccagctgaatactgatgaaaaaaaatcacatttgacaatattgattttaagatactctgatggtattaaaattttataaaaatgacatgttctgaaaggtaatgatttagttattaagcaaggggacatgctctaaaatttggaaccttaagattaagaatgtatttttctaatgtcagtctcctttgaagtttcatttttatgaagggttttatgtgtgtgtgtgtattgcctatatttaaacatcttttttctctgtgttctaatgatgaccgtgacaaaaattactttctcctgcgcctataaattcattttaaaggtggaaggatgcataaaaatgtctagtttccgtgtagagtagtattcrtaattcaaatagatggcagcattttaaatgtgctcttytgatgtttttcacaggtcgtggcaattctgcagaagttctattccaacagtgaaagtgcattggggttaaatttcatcaatgagctcatcataaggttccggcactgttctaagtgggttggaaggcaagctttcgctttcatttgtcaggttagcaagaccccgggagggatctaccctgggtaacatctgccacgtgatgaaatcaagttcaccagacagagaatctcagcctggagcactagccaggaactgaggaattagttcacctagccctgttatctcacaggacattgggaccaacccagtgtggtgaagggacttgcccagggttaccccactggcatactcatttgccacatagctattgattgagtacctacgatggtccagacagattctagatgctaaagacaaagtgaacaagcctctgctctcccacatttccatccagtaagataagggccaggcccacagtccactcctttcctatacaggtctgtgtccaccactacacctcaccttagccagtggctttggaaggaaggcaggatgaagaattgggcagtgggttagggcagagactttaacctctttagagtaaatgtgtagagttcgtatcatcctgtccagctcctcagatcgccctctctactcagcctcttggaaatgagggtgtgatttatgtttgcctaggagcaatggcagtgataatggctgccatttcttgaatacctcttgtgtgccaggtatcacatcacacatttaattctctaataaaaagtaatgtgtcrtggcgggcacctttaatcccagctacttgggaggctgaggcaggagaatcgcttgaactcgggaggcggaggttgcagtgagctgagattgcatcactgcacttcagcctgggcaacagagtgagactccatctcagggaagaaaaaaaaaaaccaagaggtaatgtgtattgagcatggcatacccatttacctttagaccagctcttttaggtgaaacatttgaagcccagagaggttaggtcacttgttcaagatcacacaggaagtgtaagccgatgatttttttttttctgctaaagtattgttttaaacattttaactttcattacacacgttttcaagcatatacaaaggtagagggattgctgtaatgaacctctgtgaacccaccacccagctttgttgatagtacagtgaagccgtggttgggaccgtacctgaccccagaccgcaaagccccctttctctccctgatgaccacgggcaccagaggactcaccagcgccccctcttggaccagtgggacattacaggagtgctttggcagcccactctgagaagggcagtggatggcagagtgaacaacaaactcacagactcacaaactcacagacggcacagacttttgtgaaggaagagtcaatgttccaaatcaatttgtggagaaagcttaaaggaaatagtttttgcttttatttttaaattctttatctgagatttagaaagtctgaaataaacaaaaggactcttgggactgcgggggaagggtgggagggggtgaggggtaaaaggctacacattgggtgccrtgtacactgcttaaaggagcctaggaatatgtgcctgccttctagtgttgtcatgggcttccgtgggctgataaagctgagctacccagcatggcgcctggcacctagggaacaccagcagccaccgccacagcacccatccaccacgacaccaattacccgggcatagaagagccacaggagttagaacccacacttcggctcacagtccccaccctgctgccacaggagttagaacctacacttgggctcgcagacccccccgctgccactggtggttatgagacctttgggtgtcaccaccacattggaaatgagtttttttttaacctgtaaaactaggctgattttgaattccagggctagtcctgagaattaagtgagagaatacatgtaaagtcgtgtaactggagaagttatatgcacwtgctgggtatgactacaggactggcatttacggattgtttatagaggtctgggcattgggttatggtttgggatttgactgtcacttgacagccacggccgctgtgaatgacagaaatgaggttcttgacccttccttaccggtcagctgtatgcagtgtggtggtattgtcctagatgttttgcataacagacctgtcatcatacagatgaggaaactgaggctcagaaaggctaagccgcttaaccagaagtcacatagctactaagaccaagttaggttttgaatctagacttctgactcctaagctcaccagatcttaacctacttggaacccactgcttggtagtgaattataataaaatattaactgtgtttctaaccaaatcagtgcttgagatttaaaaattcatacacacgcctcaaacctacagattctgaaaygacttctttgggattaaagaagtgtatgtttctagaagactgcggaaaacatcatttctttggctgtgactttcttggarcaggcagtggtgagcaaggagtgtgtccccgtggaccagttcatggagcacctgcttcccagcctcctgagcctcgcatcagatcctgtgcccaacrtgagggttctgctagccaaggccctaaggcagatgctgttggaaaagggtaggtggagcacttttcagaacttacacatttcgggtagactccaccagttgttaaaggccacaactaghtttcctctaggaaactgaggcaggttgtgtgacagcacgcgtaaggtttattatgtaaatgattatgttaactttgatgcatcattttatgttatttataaaacgaccaaggaaatgaatgtaatttggtcttcatacttaataaacatatgctaaaatgtaaattattacatagctttccagaaatgagggaaattgataaattttgagttatgacatgaaagattatgaaaggtagcaaacgtaagccttaactgctattatgttttaatggtattattttgtggtcagttagaaaagatttgtaacccaactagtggattatttacacctggacaggactcaataaaagctttgtgtttcttggatagtttatttctacaccacacatataggaaaatatcttgaactctgccctacatgtacatttcttgccacctcaccccctgccccaccctacctacaacctgctcctgctctgcacattgccatttcttttgtattgcagggaaaaaagatagttactataattttaaaaatatgcataactgttgggagtccatctttaacattttagaaatactytttgatttattgtcctgacatgtggctaacaaaaaacaaaaccgagtgtgttttgaacactgttcatggcttacctgattcagactcatggtttckctctttagcgtattttagaaatgctggtaaccctcatcttgaagtcatkgaagagaccatcttagcattgcagtcagaccgggaccaagatgtttccttttttgcagccctagaaccaaagcggcggaatatcatagacactgctgtactagaaaaacagaattaactacktccgtgatgagttgcaatctgattatttcatgcttggcacatatggcttaccataacttgaaggggaactgattgtattataccagctgggggagattttggaacctttcatactrtgcactcagtgattgacgccttttccatctgtaccccgaagggactgaacctgatgggggctttttctggatggctgggccatcctgatcaagcctgatcagtaagtctgtggaaagattgcagaccaggtggctaactgggcactggagcctctgaaccatcaggctgtctgccagcaagttcttttctccatggcagactgtatgatctgaagtccccccaaccctctccaagtaaagtagtttattagaagctcttaagtctttaatagacctgcatatttccttcccttatgatttcctataaaatatagtttatggtgttatatttttaactgaaatactgtacatatgtaaataactcttgacaggaagaaaatatattaatgtagtatttgccccctatcagtgagctgaacaaatacatcatttaaatctatgctgcactttgagttgctacaaatatggttcgatttgtttatttttgaaaaatgtgataaagaaatctaaagaatgattgatggcagtctttctaatattgtgcctttgttataaactacttggaacttttcctcaggcactcactcctccctgcctgacaggaactgtttccatgaagatatgtgttggcctttgatagaggcataaagctgaaagatttttcatttttatatggatatgctgtcatatgtttaagaacttgagagggaaatggataactgaggtttttccatttttatatggatatgctatatgtttaaacttgggagggaaattgataactgagatgcatggatattgactttatatctaatgctttagaatcttaaccaaaaaaaggaaaacctagttctgatcataacctgcccacaagttctacgcacctgtgactttgggggtcaaattatatactcttcaaattgacttaagtacacaccgcttagatttcatgcgtttcaaatttagactaagagaaagatgctctagaatttaaccaggttttttaaatcagtaatttaagattttctaaccatttgaacaaattttacttacatgtatgcacatgtcatttttcgtgtttctatttttatgttctcaaaggtaggataagggaaggaaggaggaaacagcccatttggggttcaagagctagctctgctaagggcttgtaagctatttctattctgccctttggtctttttcttgtttgtcttgtctttatttttaaatgaaattcttgaagctatgtattgaattttctagtatagaggatgtgacttccacctccaaattccatttaactgattcttttaaaagaaagataggcgtatatacaccacgccaaaataataataaggtacctatgtgagaattgcaaattataccccagggtagcatttaggcagcgtcggcaaaaagtgagttaataaatcagaagctacatattaaaaaaaaaatcagtcaatccgtcgtgtgtttaattcttgcctaaagtaaatggagatattgttttgctttggtaaccagcaatttttaatttttttttattgcccgcaaattgagattgttttgttaaaatctgttgatctagcagcaagtagaattattcaactggaatcttgtattctattcagagcttaattttccgttaaggaaaaaaatgagcttcagtttgtgttgtgatgtgtataatttgcatgctgaatcacaacatgcttggagagattgtagagactctttggtaaataatctaacctttacaatttccgtttatatgttaacatttttctataatatgagtgcctttccaatgcacagatattttttatggctgtaatttctctgtaaaaataatttttaagcatacattttattctttttttgcaacaaccgagatttttccaagattgttctgtttcccctcgccctcctagctcccgcccccgtcacttcggcgcttgtattttctaattattcatgggtgccatgttgagtgtttgtaatttgaccaccacaggtaagcttcctgtttacttgaacactcagcctcatctccggtgaatgaagggaaaagcacagatgggtttctcccaggcacagctcactccaaaggtgtcttcatagagccaacccagcctttctcaagggagcatttccccacttaatgtgtttatcagcatctttcttccgccaagaattcaagagcattttcaaaattgatagattttggtgcagttttgcaagtttccgtggaaggctgtctcccgcttctgggatccacccccatgtcgggaccagatcggctgcagggagtcatgtttatgaaatgttggtggttttttttttttttcattcatactagaagtgtttttataacgaaaatctgcactttacaactctgcaggccatgcatgcaatggtgatttacagccttgtttacgtgtaattcctccaggtgatttatcccaatttatgcaaagatcctattttaaacagacacggagaagtggtaaccgtttcctaacagcagcaagaatgccccttccgtttgcctggtgaaaagaactgacattaacagcagcttggaggcttcgaggaggtggggacgtggcctgagctcgggacgggggcccagtgcgggttgtcggagcgtggctgcccggcgatgtctctgtatttatcaataaatctcccggttgctctgggaagcacttatgtcctgttccattatttaagaaccgtctcccgcggccgcgtgaaactgcggctttgttcatcgcggagcgggaaaggactgcgggaccttggggggccgcccgcccatcggtctccctggaggctcgggcggcaggcagggaggggcctcgccttgcgtctggagggggcggtcctggcggggcctgggcgtcacagtggggcggggggcgcatgggcccgccttggggcgtcagggcgggggcggcgatgacgcgtggccaccgcactcgagccgcggatgacgcgcggccgcgcctgggggatgcggcgggcggcggcgggggcgggcggagcgcgggcggcggggccaactgggggcgcctctcgcctgcaccccaatgcgggacgcaggagcggtgcgcgggccggggctcaggggtgcggcgggcccagggtgggctcggcggactcgcgggccctccccgcgcagcccctggcctgtgcccgcggccggagccagcggctcgtctgtgacccgaaggccgcgagtgccttgcccgacttggcccctgacgtcttcgtcctgcgggtgcggctggaggagacgggggagatgttccgagtggcaaactgccgcggcgacatgaccgtgcgrgagctcaaagaggagctggacctgatggtcggcatccccttcaacctccagcggctccagtacctcgacgaaggtggctcctgccctgactccttccctggccacatgcaagggcaccctgtccacttctgaagtggattcccaaagggaagcctgcttacgtgagaaaccccagatgtcaaagcaaacccctgaaacccaaccaccctgaaacccagatggaagggccacttagggtcctggccacagagggacttcccaatctcaaacacacggcgttcaaattggactcccaatcaaggcaaaccttgtccacagcaggaccctaatccacaagcaggtcctgcctggatcgggctgcatctgccaaccctgagcaaatcctgtccaagccaggaccccccagaagccagaccctcaggctccccatgtcttcataaggaacccaggtcccaaagccaactctgttcatgtaagacttgtctgaaacaaggcctgtcctcagcagaacccccaaacccaaggcaagcctgcccatgtcagtaccccaaactcaaagcaaaccccaagtcctcctccatgctggtcttgagaacattagaaccccaaatcctctagccaaccatgtccacgcaagcatgccaaacctgaaacaaaccctgctgacctcaggacccacaaatccagaataaaattgcccaacaccgaaccccaaatctctaggctaaccatgactacttcagaaccccaaatcctccagctaccacatcccccccaggatgccagggcttgaacaaaccttgaccacctcaggaccccaaaatccagagcacacatgcccaactgaaccccaaatctccaggctacccatgactacctcagaaccccagattttccagccacttttgtcttgcaaggatgccaaatcaaaacaaaccctgtccatctcaggaccccaaaatcaacaaaccagcccaagactcaacccctaatctccaggctaaccatgactacctcagaaccccagatccttcaacaactgtgtccaggcaaagaggtcaaagctgaaacaaactctgtccagtttaggaccccaaaaccaagaacaaacctggctaaatctgaaatcccaaattgccagactaattatgtgactattagaaccccgaatcctccacaaccatgtccacacaaggatgccaagatccgaaacaaacgctgcctgcctcaagaccccatatatctctatgcaacttctgcccatgtttcagcctcaaaccctgaagctatgcctggccataacagaaccctaaatcccagagcagactctacccacgtcatgaccctcaattgcccaattctggacccccggcctccaactaaccatttgtgcatctgaaccccaatccattagccacttctgtctacataaggatgacagagcccaaaatgaaccctgcccacatatggaccccaaaattcaaagctaactctgctcacatctaaaaggcagtcaccgagctcaccatgaccataccagaacccaaatcccctcaaagtatcttcataagggctccaaagaatgaagcaaactctgtccacagcaggaccccaaagctcaagtcaaacccacacatatctgaacccccagatacgaaaccgtgtctacatcagcactccaaggttgaagctggccatgtccatgtcaggaagtcaaggttcaaacaaaaccttgcctccatgagtaccccaaaactcaaagcaaacttttcttgtatatgtaacccaaatccttcagccaaccttatttataccagaaccccaaattccagaccaaaccctgcatatagcaggagcccaaattttgagcagattttatcaccatgaagacccccaaatctcagggcagatgtgctcgattcctaccctccaaatgctacactactcggggctacatcagatccccacatcccaaaacaagtcctgcccatacgaggactccaaatcccagaacagaccttttcacatcaggaccccaaacagacagcaaaccttactttaatcagaaccccaaatccagagtaaactgccctcacaggaacccgagtctcaaagcaaatgctgctatctacgtttgaaccccaaatagtggcaactaacccagtacatatcagaaccccaaattccaagctgtgtccttgttcacatcgggagctcaaagctagcccagctggaatcagaacccagaaccgaaagttccctgtgactgaattaggaccccaagggccccactccagacaagtcccatgtggcagatacccagtggaggccaggcaccctagagcccatctctccttccatcagtctccttccctgacccgaaggcgtggctttccctatcccgattccctacaatatttaggatatgagaacaggatcaaagtccctgggctccatcatctccccacctggttgaaatcaacgcaacacacttcaagaaaatgaagatatagaaaaaatctctgagctgctgctgcacagagaatgtgaacagctgatattgcagagagactgcagctgtactgcaggggctggggagcgatggagacagatctgaaagcagcctgcctccacgggcttggtgctgccagacactgcccttctgggctcagtttcctaatccgtaacacagagaaaccagctctggaattctcggagccgtttccccctctggacagaaatgacgcaggaaactcaaaatgcacagtgaaggccaaaataccttccttttctctctttaaaataggttaagcacttttcctgacgtatttattttcctataggagtgtttggaagatgctctcgagcatttttgaggctttatttggaaagaaatgtgttttgagcctactctgtatttaacatattaaaagtgaggagagttgttgaaggacttagtaagagttcccaaacaagtaatttgaaaattatgtatcctcaactacaaatgcctggcaccccttctgttcatttgttttcactgatgagctatgcggggctattaatccaagagagctaagagggagcgcgagagagggggtgacttaacactgatgtcacagggctatcactcaacaggcacttagcaactgttagaagctcgacct

SEQ ID NO: 95334 - DNA, 83696 bp, Homo sapiens
  misc_feature (1)...(83696): n = A,T,C or G
ctagctttctaataaatcatgataagtacttaattttttcatgaagcagagggtcacataaaacttgaagtagtgctgttatagtcagtttgacttcttgattttctctctttccttcttttctcttcctgtccgatacgcatctggttatgagaaaaaatgctgggctgaagttcttgactttgcttcctcgtagctatatcatcgtggaaatgtctctgtgatttggtttcttcatgtgtaaaataaggaaaaccagtgtctacttcacagagtagctatgaggattacatgcattaattaatgtgaaattgccttgtgtagaataagcagtcaataaatgttattattacaaatgttgttgtaagcatcatcaattgcagttaatcatgattccttaaacacaaaataagaaaaatggcaaagaagagtcaacatttaagaaaaaataaagaaacatggctaaaacaattatttaattgaagaaaggcatttggcaatacacataggaagtaattcaaagcaggataaacaaacataaatccaaaatttgaagcatttgtgactgcagactacaaaagacaaagaaaagatctacagatggatgcagggcaggtgagccccaaattggggcttagcctgggagggttcttggcttccctcaggaaataattcaagagtaagccagtggtggaagcaacagctttatggagaaggtagtgtcacagttctgtgaccgctcctgcagagaacaggagctcagggcactgctgcagtcatatttatacccacttttaattgcatgcagattaatgggcagtttatgcagaaatttctaggaaaagggtggtaacttctgagtgctcaggtcattgccatagaagaggccagtaatgcccagatgttgccatggcaatggtaaactgacatggcatgctgttaggcatgtcttatggaatgctgcttccatgttttagctagtcctcagtttggtcctctgtctgcttctgcttcttcttcttaccattcctgggctcaagcaatccttctgccttggcctcccaaagtgctgggattacaggtgtgagccaccacatgtggccaacaatgaatgttctttattttattatactttatattttgagatagagtctcactctgtcagccaggctggagtgcagtggaggcgatctcagctcacggaaacctctgcctcctgggttcaagtgattctcctgcctcagcctcctgagtagctgggattacaggcacacaccactacaaccagctaatttttgtatttttagtagagacaggatttaaccatgttgacgaggctggtctcgaactcctgacctcaagccatccacctgcatcagcctcccaaagtgctgggattataggcgtgagccaccgtgccagcaacaatgaatgttcttaatatcaccagcctgtgcacttaaacatgatttaaaatggtaaattttgttatgtgttattttaccataattaattttttatttttatttttttgagatggaatttccctctgtcgcccaggctggagtgcagtgggagatcttttctcaaaaacaaaacaaaaccccaaaaaaagaccgaacaaacaaatgcaataacaacatcttttgcaatttttgaagtttgaagattacttatttcactcagagctcccttgtattacttgtctttaatgctgttctcaaatttgtgtgtgtgtgtgtggaggggggggcagctagcaggtcctacatcaccccaaatccatgattttctctttattcaattctgcagtggtgcgatctcggctcactgcaacctccgcctcctgggttcaagcgattctccttcctcagcctccccagtagctgggattacaggcgcccgccaccacacccagctaattttttgtatttttaagtagagacagggtttctctatgttggccaggctggtctcgaactcctgacctcaggcgatccagccgcctcggcctcccaaagtgctgggattacagtcgtgagccaccgcacccgcccccattctgctatttcttatccctctttgcattgcagccacactgcaatgtaaatgaacctttgacctaaatgaaccaattaattatgcccccacttcactaatgggccactagagggcgttagaaaaacatttctcaactactcggtcaatgcgttcaagcatgccacaggtgttcttgctagagacttgtcattgatgttttcttgagccattagaaggaaatggccatgaggaaaagactcggtttgctttatgttaatccaggggatatgatggtagataggtaccaaccagacatgtccatttcagacagtcaaagtagccaatctgtcctccacaattcagcatttttagagaaataaaaaatggtgctgaaacatgcagagtctaaaactgaatgtctgcttttcaagttctttctaattattggctagggaaaaatcagtgtcacttaacttctctgtagtgcaatgtctcaactttaaaatgactacaatagcaaatgcttcatagagttgctgcaaagattacatagataaatatgcgaaaacacaagaggctggaacgagcactttaagatgacagtaattttattttattacaagaaagactgaggttgaattttcttaacccagaacttagattaggaagaagtggtcattaaaatataccatgcattattacttattatggtcaccattctgtgcaatagatctctaagcttattgctcctgggaggggaaagatttattgacttgcctgatgtaatcattccacattgtgaacatatatcaaagcattccatggtactatatatataatatatataataaaatatatataatatatataatatattatatataatattatatatataatattatatataatgttatatataaaatattatatataatgttatatataaaatattatatataatatatataaaatttatcaattaaaaataaaaataaaatgctgacaaaataagaggtgttaaatgaatgtataagaaacatgaggtagctgaagtaggagtcttactcaaaccatctgccctgatctgtctatcatcccatgctgggacatgaaaaggcacatattcagaggactgggggaattgagagagagtgaaggacagacagagtcttcatcagggacgctcccacatgggaagcctcctaccatgaaccttaaagacgtgagttctggaaggtgtctgagaagagattttctgtggttttgccagagagctggcaacgaggtgatgggagcaaacccttccttcattattatattttccaaaactcacagcattattttggagaattgttaaggtagtaggagggagatttaagaaatagccccagagtgtctttgtgtttgctgccctgcatgtttgccaggaagaacatattcctcaggtattagtctcgtgctgctgataaagacatacccaagactgggtaatttataaaggaaagaggtttaatggactcacagttccacatcactggggaggcctcacaatcatggcaggaggcaaaaggcacatctcacatggtggcaggcaagagagaaaaaagagccaagtgaaacctcttataaaaccatcagatctcatgaggcttactcactaccatgagaacagtggaaaccacccccatgattcaattatctttcactgggttcctcctgcaacacgtggcaattatgggagctacagttgaagatgagctttggatggggacacagtcaaaccatatcacctgaggtatggagagactgaagaaaatgaatgtgccatttttgatctttacagagggtttcaaatttgcaaatgctcaaaaatgttatccctcaaagacctttgaggaaaaagttagttgattgactccagcaaaatggaatgtaatacaagaaaggcgagagtagacaagcacagtggctcatgcctgtaaccacagcattttgggaggctgaggtgggaggatcgcttgggtccaggagttcaagaccagcctggacaacatagtgcaatctcatctttactaaaaattcgtttaaaattgctgagtgtttactaaaaatttgtttaaaattgctgagtggcacatgcctgtagtcccagctactcagaaggctgaggtgggaggatcacttgagcccaggacattgaagctgcagtgagctatgactacactactgcactccagcctgggtgacagagcaagaccctgtctcaaaatactactactactactactaataataataataaaaagaagagagtacacaggaagcagtgctgaataaataaatgtataaaacaaagtctgaatgtgttagtgcacagttgtgaaaataatctggaattaacatttcacatgggaggtaattgaaagagcagagaagaaagagagaatgagcatatgttcatgtttttgtttcgtctgggaagaagacataggtaatgactatctttatatttgatagaaaatataagcttaaatacgtgtgctgacaggtgaaaggtggttaccaccagaaaactagaaaagatgtgtacaagtttcagagccttaatgggaaatgcgtggattgaagaaaacctgattcatgcaatcagaggtgggtgggaaagaattacaccgaagaagcagaaaatctgatatgtgtaaaaaagggaaaataatataaagtgaaactgcaggactcaatccaaatataaccatgatcataataaacatggatggattaaaattcctttaaaaaagataggctttctgaatgggaaaataaacataaaatccggacatacggtagtgtaggaggcagcttaattaaaaacaaacaaaatgttgaaaataaatggatgcatttgatatgattctgttccactatccaatctaagtaatggtcaattattttatagattgttcttcagtttttttttttttttttgagacagagtcttcctttatccctcaggccggagtgcagtggtgcgatcttggctcactgcaacctctgcctcccaggttcaagcaattctcatgcctcagcctccacaattgctgggagtagaggcacctgccaccacgcccggctagtttttgtatttttagtagagacggggtttcaccttgttggccaggctggtctcgaactcctgatgtcaggtgatccgcccgcctcagcctcccaaagtgctggaattacaggcttgagccactgtgcccagccttcagtttggttttgtccagtgttttctcatgattagactgaggttatgcatttttggcaaaaaaatcatcagaattgatgtaagttttcagtgtgtcatgttacggagtgcatgatgtctgtatgtcctgtcctggtgatgttaaatttcatcacctggattaagtggtgtctgttggaattctccactgtgaaattattattttttctgatccaggaaaggttaagcaagagtctggcaccattttaagtctaataagaaacatttactacctgatttctctgaagcctgctacctgcgggctacatgtgcataataaaaactttggtctcctcaacgccttatcctcacccagacatttcctttctactaattacaggtctttaatcagaaaatcctggaatccacctacgacctggaagttcctcactttgaatggaatcccacctttctggactaagccaatgtacatctcacatgtgtcgattgatgtctcctgtccccgtaaattgtataaagccaagctgtcacccaaccaccttgggcacttgttctcaggacctccttggggctgtgtcgtgagccattggttaaatgaataactcttttcaaatattttacagagtttgactcttttcatggacattaattggtgccctacacgtggggcctcagaaaagactcagaatccttgacgcagttgcccgaacccggagctaagttacccgcagggccattggaagccctccctggctttaggtttctcctccagtggaaccggtgagtcctctgcagctctggaccttccatttggttgatggtccttggttcattctgagctgtttttctacctcctttttatttttctcctaggaagttgttgtataggatcctactttaggtttggtggtgcattctaaatggtcttctccactgcccttttccccccaaattaatgtcgattggcctgtgagtacatttgcgtgagagactgaactgccacttttgtggcataattttgaattgccaaacgagaggctgacctcctcagcttggaaaagaaagggagttttgctcctcctagccaaaaaccacccctgggtggtaggggttgagtgggagtctctgggggattgactcctgccatgatgtgcagtgaccctacagggaaccacacaacaaaattaattttaagaggctcatccaggagacaggtgtaagagctgatcacttgctatgttgagccctgtcagaggtctagacctctggagagagaaactcagacacgtgaaagggtagaaagactcagtggtgacacacagtgtagtccctctcacagccagcacacttcaatccaccctactaaaacccaggccacagtttagttcctcattttaaaataaaagtgggagacatagcatgtaaggatgaggaaaggcggagagagcgacccccatttgggcaccccttttggttctctggttcctctacttgcaagtatttgtgtaagcggraaaagcttgagggcatgccaggtcaaacaagaagcttcctgttacatattatgtctgtgcttgttcacactttaaactgctgcacacattacaccagagaaaattccagcccaaaggtcaacctgcaaccaatcagttcctaagtcctctattttgctattttcttttctgcctactttaaatcttctgtttactttttgttcttttcttttcttttctttttcttttttttttttttttgagacagagtcttgctctgtcacccaggctggagtgcaatggcgctatctactgcagcctctgccttccaggttcaagcgattctcctgcctcagcctccccagtagctgggattacagacgtgcgccaccacgtctacgtaatttttgtatttttagtggagacaggctctcaccatgttgaccaggctggtctcgaactcccgacctcaagtgatccgccggcctcggcctcccaaagtgctgggattacaggcgtgaaccaccactcctggcccttctgttacttttccactgctgttgagatagaagtcactgttgggatccaacctttttgtttgtataaactggtgagtttgtgttgatatctcttgctagagttctgaagtaaaagctataggatctttgtgtgagtgtgcatgcgtatttagatgtgtttatgtacatgcacatatgtgtgcacatatacattttttacgtgctttagccctgaagtgtcaaattggyttcaagtcaaagagtactcataaattaaataataagccaaaacgcttttcaagttcacgtgacttacataaatctttaataaataagctggctttaaaattattggtacgatagtattagaaatatcttaaaaattgtcagcatacatgtttgtttgcatttactgatcaagcagtttcatatttacctctgacagatattataaggtgtcaaaatttggcataaggcttacaaaactataaacccagcaacccagcatgaaacacaataatctttgtttctgtactttttgagaaataagacgtttaatgttattagtgtagtaaaaagagctaaatcccaagttatcagtaaaatatatatatatttaaaatttttgcttaggcaaacacagaaaattcatagactataaaaatggttaacagggaaataactttaaatgatgactatcagagttttcacagataatctaggtaaaagattttataaaattaattaggtaaatgtaatgaaacaaatgcctgtaaataaatataatttagaatctaaagttaaataatagatattcactaaatgtctgggccattttcaatttaaataaattgtattatagaaaaacttttctaaaaaatatgttcttattcaaagctaagttattttcatctaattccatgtttatttatttatattttttgagatggagcctcgctctgtctcccaggctggagtgcaatggtgcagtctcagctcactgcaacctctgcctcccaggttcaagcgattctcctgcctcagcctcccttgtagctgggattacaggtgcccaccaccatgcctggctaatttttgtaattttagtagagataggggtcttgccatgttggccaggctggtctcgaactcctaacctcaggtgatccacccacctaagcctcccaaagtgctgggataacaggtgcaagccaccgcacccggccagattctaggtttatttaagggttatttatgaaatatggtaaaaggaaccaagaaacaagagatgtaaagaaagttaggctgcgtgcattgggtcacacctgtaatcccagcactttgggaggctgaggcaggcggatcatgaggtcaggagtttgagaccagcctgaccaacacagtgaaaccccacctctactaaaaatataaaaattagtcaggcatggtggcatgtgcctgtaatcccagctactcaggaggctgaggtaggagaattgcttgcacccgggaggcagaggttgcagtgagccaagatcgtgccactgcactccaggctgggtgacagagcgagactactccatctcaaaaaaaaagaagaagaaagttacaaggaggtatttttggtaagaaatgttaaaagaaaaataattttgtatgagaaagaatcttgttgtttaagagagatgtttaggacagaacagaaaatccaagcaggttgtatatggtctgtgcaagtcataatacagtctgtaaaaaaggaattcaaaaaaatttttatgtaattaagtttgctataactaaaaggaaattataatcattctaggtattggacttcaataataaaaatacagtaatgcaaaaggagatcattggttagaacaagattttcttaaaatactgatgtactcagtgaaattgcaagaagttttttatttttgaattccataatctcttcttgaaattcttcagatggacatcctaggggttccacttctgctgcatcctgcttgcctcagagctttccctcttttgaaaaggcctgggatggtaactctctccttcaacttttgctggctcccgtaatyttttaaaaattaatagtctaaaggaagagagagaatttttgaaaacaggcaagtgaaaaatgttataggatgtgcctctatctgtgtgtctgtctataagtttatttattgtctgtttgtttgattgatttgtttattttggagacagggtctcactctgtcacccaggctggagcgcagtggtgtgatcttkgttcactgttcccttgagcactgggctcaagggatcctcctgcctcacctcagccatccatgtagctggaaccacaggtgcatactatctcgcccagctaattttttgtattttttatgtagagatggggttttgccatgttggccaggctggtctcagtcctgagctcaagcgatccacccgtcttggcctcctaaagtgctaggattacaggcgtgcggcaccatgcctggccttgtctgtaagtttctatctgtcatgaggaagtaatatttcagtaccaaattatatgaaagagctctaatcaaatggcttaaagaaaagtaagtgcttatcagacaaccaaaagctagctcagatgcttttaattgacattcctttagtaatctttggtaagactaatttggtaaatttaatttcaaaatcctgtccagtggtttaaaatcttagagtcacgttagatgggactgttcccctgaccttgacccccttcgtgggcaggaactggagtggctcatgttactcagcctgcagtttgtggacagctatgtgttaacagctcagygaagggtcaaggtgacagccttctgcatctgtccttttggacaccgacttcttgtttggtgtccaagaatcatcaggtcacacaaactgaaagatgatgaatgtggaggactttattgagcagtggaagtggctcttggtggaagaggagctggaaaggggatggtgtgtgaagaaggtgatgtttctctgaagcctagccttctctggctgggctcccctccaaaaccacaccgtctgaagttagtcatgtttatctgtagtctccaatgctcagttacttctctgctcgccactcagtagcttgtatccctgccggtcagctgcttgtgttgcttttttctttttctttttcgtttttcttcctgccagctggtctggtccttatgggcacaggatagggggcagggcaggccaaaaaggcaatcatctgggcagagaaacgaggtcagctgctttcactagggccgagcttccagacttgaggttgtagtttagccgggagcccagccatcctgtatcaatgttagattaaattaggcaatcctaggttttgcactggaaattagggttactgggagttggaatagtaggagagtaagatgtatttttggtgaggtttataaaaacacaaagatgtggtttttgccaaagaaaatgtaatgtttagaggctatttaaaggtcactttaaaataaatggaaaattatgtagataaaactcattggagaaagagaaaaataaagaggtggggaatgagaaacctttgacttttgggtggccacgtggtcacacatggtaatgaagtggcatcattttctggggtaaatacccgagattcattgtctcatggccacagaaatcgaggacgtggacacacagaatgaggttgagagcagaagtttagtaggcaaaagaaagagaagagctctctgcagcagagcggggtcctggagaagtgggttgctgcttctttgctgaaatgcagcaagttttatagatgagcttgaggaggcagtgtatgatttacataggacgcaaaagattggttggaccaggtgtaccattttcatagggcatgtaaagctggttaggactagatgtgtcatttgcatagggcatgaaaagctgggctaatcttttttttttttttttttgagatagaattttgctcttgttgcccaggctggagtgcaatggcgccatctcggctcactgcaacctccacctcccgggttcaagtgattctcctgcctcagcctcctgagtagctgggattacaggtgcctgccaccacacctggctgatttcgtacttttagtacagatggggtttctccatgttggtcaggctggtctcaaactcctgacctcaggtgatctgcccacctcggtgcctaatcttttattatgcagatggactctttacctggctagtgcatgtcgcctgttttttttgtttgttttgttttgttttgttttttgagacggagtttcactcattttgcccaggctggggtgcagtggcgtgatcttggcctaatgcaacctctgcctcccgagttcaagcaattctcctgcctcagcctcctgagtagctgggattacaggcatgtgccaccacgcctggctaatttttgtatttttttaagtagagacggggtttcaccatgttggccaggctggtctcgaactcctaacctcagatgatccgcccgcctcggcctcccagagtgctgagattacaggcgtgagccactgcgcctggcctctggttttttactgtacatgtggtgacaaagaaaagggaagacggagcctccatgttgaacatacctggcttccaggtagccctttcccattggcacagctgccagcatttacccattcaagcttccagcttgcttattatctatgcctgcagctctattttccaggctgctctttgttaaaaagaaatgatttgggggctcctttttaaaaagggaaattctgccaaggactcttttaccctcactatctgcctgaataatttctttctagttcctctatcagtaaggagatgcagctggcttgtcttcagtcactaaaggtcaaagccaccagaggaatttagagatggatcctactcatagtcccagggaatttcgttcactggatatatagcaaatgcaaattaataaggaaaaagtgaactattcaatcccttgcttactgcctctgtagttgctaaaatgaaagtaaaagagtgctgccttgggcgtgaaggcagcaccaagctcagatgtgggtctgtctcagatcaggccagtgacctcaaagcttcctacacaaggaaaaattaagccacgtcaaccaaaagttacctctgagacctgtgattaccaagaagatagacatgtggaggaagggcaaaaccaagtaactattaaacccagagggtatttacagggctgttcaatcttttggcttccctgggccacactggaagaaaaattgtcttgggccatgcataaaatacacaaacactaatgatagctgatgagaaaaaaaaaaggcaagaaaatgtcgtaacattttcagaaagtttacacatttgtgttgggccacattcaaagctgtcctragccacgtgcggcccgcgggccgtggattggacaagcttgaaaaggaattggttcatcttctagattggtatcgtcagcttcctgagttcccttttctaaaatgggttgtaagaatgactactttaagaacagtatgtttaatttttttttttttgagaaagggtctcattctgtcacccagactggagtgcagtggcatgatctcagctcatcgcaacctccacctcctgggttcaagtaattctcccacctcagcctcctgagaagctgggattacaggcacacgccaccatgcccggctaatttttctattttttggtagagatggaatttcaccatgttggccagactactcttgaactcctgacctcaggtgatctgcccaccttggcctcccaaagtgctgggattacaggcgtgatccactctgcccaccgatatgcttaatttttaaatgccacagaaagaaagagcatgtttgggctggtgcagggcccgcagctcactcactattaaacacttgctgatgagtgtatgggacccagatgcacaggaagtttttcctgaggaaatggccagcctggtggactaggtaaacaccactacaaggtctgtttatcctgaaaaggggactgcccagccctccctataaaatgcmaagtggagcaccctagataaagcagctgatgtgcttcatatgcaagccatgtgggattggcttaatgatgaccgggatattcaccagctgaatatgcccattacccaatgtattagtccgttttcatgctgctgataaaracayacccgagattgggcaatttacaaaagaaagaggggtaattagacttacagttccacgtggygggggaagcctcacgatcatggtggagggcagggaggaacaagtcacatcttacatggatggtggcaggcaaagaragagagccaagcgaaaggagtttctccttgtaaaaccatcagatctcgtgagactcattcactaccacaagaataatatggaggaaactgccaccagaattcaattatctcccaccaggtccctcccacaacaatgggaattatgggagatacaattcaagatgagctttgggtgtggacacagtcaaactatatcacygaggtcatagtgtgaaaggaaaataaawctcaggaccccaaaatcactaagccaagggaaaagtcaagctgggaactgtgtcaggcaagcctgcctcccatttgattcttaaataagacagctacaaagataagaagctacatacccccctcacaatttgtgcttaaggaaattccttgtggacaaaggacagacggaactcaaagtcatccttccaaggctcccctgagacaaatgcttatctgataacttcctctgcctcattgcttatgtaaaagtacagattcacggagccagcctaaattgtgtattcagtggaaagctgatcaaggactcaaaagaatgtaaccttttgtctcgtgtctacttctaatctgaaagctcccacttcaagttgtcctgaattactgaactgagcccatgtatgtcttacacatattgattgatgtctcatgtctccctaaaatatataaaagcaagctgtgccctgaacaccttgggcacatgtcgtcaggacttcctgaggctgtgtcacaggtgcacgttctcaaccttggtaaaataaactttctaaattgactgagacctgtctcagatattttgggttcgcaatagattctcagtgtattaatgatgttaggtgaagaactgtgaagctcataaatttggaaaggaaaggtttatttctataaatgttgtggttcaagggtccccttctacaagagcaccccaggtgacattactcttgcagaatcaaacaatggtttgagaaaccttatcaaatwtgcagttgtagctttccctcatgggtcttacagatgctaccaaaagactrgggtgtcaacgagaagagacaaactgtaaatttttttaagaggtttattctgagccaaatatgagtgaccatggccgcccrtgacgcagacttcaggagatcctgagaacatgcgcccartgtggtctgcgtacagcttggttttctacattttagggagacatgagatatcgatcaatacatgtaagacgtacattgtttccattcaaaaaaggtgagataactcaaagtgggggattccagctcatggatggacaagacacagaaggttgcattcttttcggtctttgatcagaatacacaatttacatgtgacggaggttggggggtgggggtggtgggtagaggaatagtgactgatgcctgttcagtgaatctgcaagtttgcgtaaacaatagggcaggggaatctatcagatatgcatttgtctcaggtgagcagagagggctgactttcacttctgtctctcctttgacccacacctgtgaagataagccaaggtgaaattgaacagaactgttttagggtaaagatcttgaggtccacaaaaaatttctttgtgggcaaattatgaaagaggtatgtagctttttgttttgttttgtttgtttgtttgtttgtttttgtctccatagctgtcttatttaggagaaaatgggaggcaggtttttctgatgcagttcccagcttgccttttccccttggcttggggattttggtttcctttcactaattaacaaacaaaattaataaattaacaaacaaaaacagggaagggaaaagtgagtcaaagggctcatgccagaagggtggaaatctttagataattattttgttattattattaatttttctttttttgagatggagtttcgctcttgttgcccaggctgacatgcaatggtgccatcttggctcactgcaaccccacctcccaggttcaagtgattctcctgcctcaacctcctgagtagctgggattacaggcacctgccaccacgcccagctaatttttttgtatttttagtagagacgaagtttcacaatgttgggcaggctggaatctttagataattgttaagaaataaaagaaaagcgaaaattagatgcgagttaaaacaaaagactttacaacatgatcaaaggttgggtgggccacagggagccccaactggtcccccaacatgaaggggccccatgccagttttcttcatttgcctcagattggagaagtttaagaaaaattgaggctgggcatggtggctcaagcctgtaatcccagaactttgggaggccaaggcaggcggatcatctgaggtcaggagttcgagaccaggctggccaacatggtgaaaccccgtctctactaaaaatacagaaaaatttgctgggcgtcgtggcacgcacctgtaatcccagctactcaggaggctgaggcaggagaatcgcttgaacccaggaggcagaggttgcagtgagcagagatcatgccattgcactccagcctgggcaacaagagcgaaactctgtctcaaaaaaaaaaaaaaaaagttttagagcaggaatgaaaagaaggaaagtacacttggaagatggccaagtagctgacctaagagatcaagtgtatggttgacctttagacttggggttttataggttggcatgcttctggagtcttgtgtcccttctccgctgagtcttcccttggggttgggctgtccacatgcacagtggcctgccagcacttgggaggggagcatgcgcagtgtgtttactggagttggacgcatgctcacttgaggcgttcttcccttaccagctgaatgttcctagaaggttatagaccagttaaactccacckttttgcttctcagtgtgcatgcttgagcccactcactcacctyctgagatcgtattgggaaactgctgaccaccagttttaggtgttttctatttactgggagacggcctttccctggtgctgactgtgaccaattattattttagagagacagtttaataaccgcctgatgctcgcctgacattcctggtggggctggggagagcctttcctgccttgctcatgcctgactagctacctactgtaacaataactgaactctttctaccgatttccagtgagaaaatctatgcatctatctatgacctgcaagcccccactttgaagtgtgtcacctttcctggctgaaccaatgtccatcttacatgtattgaggggtgtcttatgtctccctaaaatgcataaagccaatctgtaactcaacaaccctgagcacatgttctcaggatctcctgagggctgtgctatgggccagtagtcactcatatttggctcagaataaatatcttagaatagtttacagagtttgacccttttcatcagcagaggcatacactcttgctatgggatgttaaccgaagctaatggaaataatggtgtccaaaagagttccgtgatgaaacgtaaatggttcatgtaggacctgctacctggggaatgcaaagataatatacaaggagggagcttctttttcctcttcagactgactctgtaactgtgagaagatttttgccttccaaagttattagtgtgttcatttttatctcttaggaaaaaagtggcaaagttggagatggtgtacactttcctttattgcttgactgaggttaaaaatttggccaggcatggtggctcactcctgtaatcatagcattttgagagcccaaggccaaggatagcttgagccaagaagttcaagaccagcctgggcagcatagcgagaccttgtctctacaaaaaataaaaaaattagctgggtgtggtggtgaacacctgtaatcacatctacttggggggctgaggtgggaggattgcttgagctcaggagctggaggttgcagtgagccaagattataccactgcactccagcctgggcaaccaagcgagatgctgtctcaaaacaacaacaacaacaaaaagaacaacaaaaaacaaaaaaaaacttgtattctattgtctcccatcagattatttttaactaattttattttaatcacttactgttgagtcacctctgagattttctattccagtggcgtccttataaaatgaagcttccttgtcaactgcacttgttataacaccgagcttctgctaagaaaaagcaaatgcataactctgtataacctatctcccatgacagggtctatgcctcgctgtatttaagcattcattttagttttcagcaatgtagtactttcacctatattttgtcaaattcaaacacttgcaatacttcatttattttttctgcatgtccttcatattttggctttgctagtccactttggccaaaaagctttgattctttaagtataggcctaaatatcctatcttaagcatgggtgtaattttcttctattaccaacagaggttcttttatagtttttgaaatcactgattaaaaagaaacagctcaaattatattctactgtaaaaatgatacattcagcctgggcacggtcagtcacatctgtaatcacaatacgttgggaggctgaggcaggaggatcacttgagtccaggagttgaggctgcagtgagctgtgatcacaccactgcactctagtgtgggtgacagtgagaccctgtctcaaaaaaaaaaaaaaaaagatacattcaaagaagtcaaaataaaacagtataaaacctatctccctgattgcagctacctttttttatgcatacgcctgcaatccttttacacctatcacacactaaaaatgttttacagttattgttattgcacacagaaggcatctaggaatgttttaaagaacctgtctctctgaagttcatcctgcttatctaacttgtctatcaaggaaattattttcttgattattattgctgagaaagactgggtgaggttgctaccccagaattagcagatgcaaatcaggaggaagtgaacaggctgcaaattagcaagttctggcatggggtgaggcaatggcagaaaatcggtttcctgggaaccatgcccaggaactagcctgacattgtgagaaagctcccaacattcataatgagttgcatattaaattccagggaagggcactgtaggtaagatggaccacatttggaaatacactttttcagacgttttatttagggagaatttctgacatgtcctccgataatttgaacttccttgatttgcagttgtacattgagagatcatttcttggtcaaaataaatgttcagcaggtgtgaatgctgtatccacaacttttttttttttttttttttgagacagtctcactctgttgcccggggtgaagtacagtggtgtgatctcagctcactgcaaactctgcctcccaaattcaagcaattctagtgcctcagcctcccgagtagctgggattacaggcatgtgccaccatgcctggctaattacaacttaatttttaaatttgggcagatttacaaaactatcaagctattaccctgcagcatccttagccctaagcttgtcactacttgtaatgtatttttattttatttatttattttttgagacagagtttcactcttgtcgcccaggctggggtgcagtggcatgattgcggctcactgcaacctccacctcctgagttcaagcgattctcttgcctcagccttccggaccacaggtgcatgccaccacgcctgggtaattttttttttttttttttttgaggtggagtttcgttcttgtcattcaggctagagtgcaatggtgtgatcttggtttactgcaacctccacctcccaggttcaagcgattttcctgcctcagcctcccaagtagctgggattacaggtgcccaccaccacacccggctaatttttgtatttttagtagagacagggtttcaccatgttggccaggctggtcttgaactcctgacctcaggtgatccacctgcctcggccttccaaagtgctgggattacaggcatgagccactgcacccagcctacctactggactttttttcggagacacactgtagtttctcaagaaagaatgcctgttcctggtcccagctgcacactcactttacagtgtgtgctgtacttggtcaagtgtattgatattgaaacacaagccagactggatggaccttggtcnnnnnnnnnnnnnnnnnnnntaaagaaggtggaaatgtggaaggggagaaaaaacaaaaattagggtatagataaacaaaaggagagagagaaaatagatagggaggaaaaattgagggagaggagggggatgtaatcaaaaaaaacaaaggggggggaaaaaagtggtggggaggagaagtggggagagataaaaaagacaaaaaaaagggaaatagaaaataaagtaaaagacgttattaagggaagaaaaaaaatgtgaaggaaaatggaaaatagagttgaaatgaaatctgaaaaaagggaaaagagagatttacaaaacgggaattaaagagaatgagaaaagaaagaaaaaaattgtgtgagagaagaaatgggagggtgtaaagaagaagaccggagaagaaaaacagtagagataaagatattagtgcagaatgagaaaatgagaggaaaaattacagtaaaatgagaaagaaaaggagaaaaaaaatgctgggcaacaagagcaaaactccatttcaaaaaaaaaaaaaaaaaaaaaaatctaatattgtccccaattcctacttttgggagtaaactatgcctatttcaaactattgctggacaagattgcctggtttctgcttccccttatccctcttgttcaagtcaaccagtcaggaaatataaagaatgatcaaggaaacctccaagttaacacagaaatacgtatatatggtgaatgctgtctgcagacagcttatggccccatggtactagccgtcatagcacatggcaaagttgtcctattgactctgctgtcagcccctgcgtggaagaccaaataaaggtgctgggacagaaggatgaaaaggaatcctaggataaatatctcatcttcatcgtccctgggttggataattctgagggtctgtcgttgaatctcagtgtttctgcacagcactcagcttcaatagcccagtggcaagctgcttcataagtacaacctctactggcttcctgcctttccctgtctctcttcctctttccctgaccaatgctccctcaattacctccctaataacctacttggatttaaggtttgaaaaagaaatgcggcatcattctttttgtcttaaatttttaattaaaaaaaatttttttcgagatgggatcttgctctgttgcccgggctgtagaacagtggtggaattacgatacggctcattgcagcctcaaaccctttagctgaagcaatcctcccacctcagcctcctgagtaactgggaccacaggtgtgtgccaccgtgcctggataatttttgtaaaatattttttgtagagacagggtctcactagttgcccaggctggtctcaaactcccaggctcaatcaatctgcctgtctcaacctctcaaggtgttgggattacaggcgtgagccactgcgccgggtcgcaccatcattcctattttttttttttttttttggaaatgaagttccctctgtcacccaggctggagcacagtggcgctatctcggctcactgcaacctctgcctcccgggttcaagtgattctcctgtctcagcctcctgagtagttgggattacagtcatgtgccaccacacctggctaatttttatatttttagtagagacggcgtttcgccctgttggccaggctggtctcgaactcctgggctcaagccatctgcttgcctcaactcccaaagtggtgagattccaggcatgagccaccactcctggacgaagcatcattcttaatttcaatgtctagtctagacatttaaaagaattgaacatattggatcgtatcaaaacaacatcttgttgaagagaatgaccctctccacccaacctgaaacagatggaggcagtgctgactttatctcaatcttaaacaaaatctgtttcactcaattttcttgtagacaggccgactgctttattagaaaacaggagaacattgacctttttctatgattctcttccgatcaccctaggtagaattcctttcactttctaacctgtgtctgtttcaacccaggatacattaagcttgttgtctgtgacactttattgaactttttaatagccacgactgacactgatcctctctgctgagagaggagctattctgattccattcattgtgactccaaagtctaccctggaagtcagatgctcaggtgggattttataaatattccatgaacaaatgaacttcggctttggggtaaaagagtcggttgcccatcatttgatagatccctggatattttttcataaaaaacaccctagcaggttgcttattgcaaaatgacatgtgtcatatcttctctggagctgaatattgttaagcaaaatttatattaatgagaagcaaaaaaaagtttgtttgttttgctttgcttcagcaagaattatctgttgcatcagaaatgcagggagcacttttgctctttattagcgtttttttccccagaaactctgacattactaggacacttggtcatctgtgatctgcttaaaagctctcttcagctcctggaagagtaggtggttctgattctctttcggtgagatggtttatggagccctcttcatcccataattctgaagagtaacaggcagaacgtcttattagggggcagctgaaatcgtctagggaatgtggctagggagtgtcgtcatctttacatcaaaggctatgcacagataacacgccaatcctgatttcacccatgagaaaagtgaactccaagaatttcaggaatgtagacgtgtcgatgataaacattgcatttattacaatttcactttatttcctagaagaggggacattatatttcctggccagatgctaccctttgaaagaaatgcaaactttgataaaatagacatgctatcaatttccttaggggagctttatcttcactgggtcactatacccagcatgacagtaaagtctgccatgtgtttcttgtcccactggaaaaaaatacatagaaaagctatgtacaaggactgtattaagattcatctatgtctttcagagatggcaggcaagtgccatttctgaacaatttgggtgaagtcagacacatgcaccttaccccgacaaccactcaatggacagcagaacattgcaaatcatgacctgtaataggactgtctttgacttacacagctcaggaaacaacacttggtttggtcaaaggtttgttccttttcatttcgtgttctagtgttttcttttcctgcccttatgacagttgtgtgcaatggcattattgcattaaatagacacgactgattaggtagcatgaaccatagtttagaatttggctaagtgtggctatgttactgtctgttttttctttttctttttttaggagatagggtcttgctgtgttgcccaggctggagtacagtggctattcagacatgtgattccaccactatcagcacgagagttttgacctgctgcatttgtgacttagggtggttcaccaggccttaggcagcctggtggtcttctgctcctgggaggtcaccaagctggtgctgaacgtagtgcagatacttgatcagcctagcgcaccatagcccagaacttctgggccgaagcgatcccccacctcagtctcctgagtagccgggaccacaggcaggctacttgctgtttttgtcaacataaaagggagtcagaaaaggcagaacatatcaagatcagtaaatctaggctgggcatgatggctcacacctataatcacagtgcttcatgaggccaaggcaggaggattctttgaggccaggagttcaaaaccagcctgggcaatatagggagaccttgtctctacaaaaaaatagaaaataaagaaattacccaggtgcagtggtgcatgcctgtagttccagccactccagaggctgagactggaggatctttcgagcttaggaggctgaggctgcagcgagctcttatcacaccagtgcactccaacttgggtgacagaatgagaccctgtctctaaaagaaaaagaaaaaaagagattagtaaattctttagaaaccaagattttaccatgagcagttgcatgaaggtggaaaacctttctgtgattataagtagggattctgaaagaagtcctcaaagtgaatacttattccatggagaaacagaatgaattgagagagtcctggaagctgggaggagaggaatctgtagaaagcagagtcacttaactaattcaccaatgagactgcaaaccgatggtcatggagctgccatgggaatctgaattacagtcacttttattctttgtattttattgtttggattgaaaatgcggccaggcacggtggctcatgcttgtaatcccagcactttgggaggctggggtgggtggatcacctgagatcaggagtttgagaccagcctgaccaacatggtgaaaccccgtctctactaaaaatacaaaaattgggattccattccaagatggccaaatagaaacagctccggtctacagctcccagcgtgatcaacacagaaaacgggtgatttctgcatttccaactgaggtatcttgttcatctaattgggactggttggacagtgggtgcagcccacagagggcaagccgaaacagggcagggcattgcctcacctgggaagtgtcagaggatttccctttcctagccaaggaagctgtgacagactgtacctggaaaactgggacactctcgcccacatactgcacttttccaatggtcttagcaaagagcacaccaggagattatatcctgcacctggctcggcagttcccactcccacagagccttgctcactgctagcacagcagtctgagattgaactgtgaggcagcagcctggctgggggggtgggcatccaacattgctgaggcttgagtaggtaaacaatgtggccagggaagctcgaactgggcagagcccactgcagctcagcaaggcctactgcctctgtagattccacctctgggggcagggtatagctgaacaaaaggcagcagaaacttctgcagacttaaacgtccctgtctgacagctctgaagagagcagtggtgctcccagcatggtgtttgaggtcttagaatggacagactgcctcctcaagtgggtccctgacccccttgtagcctaactgggagacacctcccagtaggggccaactgacaactcatacaggtggtgcccctctgggacaaagcttccagaggaaggatcaggcagcaatatttgctgttctgcaatatttgctgttctgcagcctccactggtgatatccaggcaaacagggtctggagtggacctccagcaaactccaacagacctgcaggtgagggatctgactgtcagaaggaaaactaacaaacagaaaggaatagcatcaacatcaacaaaaaggacatctacaccaaaactccatctgtaggtcaccagcatcaaagacaaaaggtaggtaaaaccacaaagatggagagaaaccagagcagaaaagctgaaaattctaaaaaccagagtgcctcttctcctccaaagggttgcagctcctcacgagcaacggaagaaagctggatggagaatgactttgacgagctgacagaagtaggcttcagaaggtcggtaataacaaacttctccgagctaaaggaaatgttcaaacccatcgcaaggacgctaaaaaccttgaaaaaagattagacgaacagctaactagaataaatagtgtagagaagaccttaaatgacctgacggagctgaaaaccacagcataagagctacgtgatgcatgcccaagcttcaatagccgattcaatcaagtggaagaaagggtatcagtgattgaagatcaaatgaatgaaataaagtgataagagaagtttagagaaaaaagagtaaaaagaaatgaacaaagcctccaagagatatgggactatgtgaaaagaccaaatctacatctgattggtgtacctgaaagtgacagggagaatggaaccaagttggaaaacactcatcaggatattatccaggagaacttccccaacctagcaaggcaggccaacattcaaattcaggaaatatagagaaagccacaaagatactcctcgagaagacacataattgtcagattcaccaaagttgaaatgaaggaaaaaatgttaagggcagccagagagaaaggtcgggttacccacaaagggaagcccatcagactaacagtggatctctcggcagaaactctacaagccagaagagagtgggggccaatgttcaacattcttaaagaaaagaattttcaatccagaatttcatatccagccatactaagcttcacaagtgaaggagaaataaaatcctttacagacaagcaaatgctgagagattttgtcaccaccaggcctgccctacgagagctcctggaggaagcactaaacatggaaaggaacaaccagtaccagccactgcaaaaacatgccaaattgtaaagaccatcgatgctaggaagaaactgcatcaactaacgagcaaaataaccagctaacatcataatgacaggatcaaattcacacctaacaatattaaccttaaatgtaaatgggttaactgccctgattaaaagacacagactggcaaattggatagagtcaagacccaacagtgtgctgtattcaggagacccatctcatgtgcagagacacatgtaggctcaaaataaagggatggaggaagatctaccaagcaaatggaaagcaaaaaaaaagcagaggttacaatcctagtctctgataaaacagactttaaaccaacagagatcaaaagagagaaagaaggccgttacataatggtaaagggatcaattcaacaagaagacctaactatcctaaatatatatgcacccaatacaggagcacccagattcataaagggagtccttagagacctacaaagagacttagacttccacacaataataatgggagactttaacaccccactgtcaatattagacagatcaacgagacagaaggttaacaaggatatccagtacttgaattcagctctgcaccaagtggacctaatagacatctacagaactctccaccccaaatcaacagaatatacattcttctcagcaccacatcacacttattcaaaaattgaccacatagttggaagtaaagcactcctcagcaaatgtaaaagaacagaaatcacaacaaactgtctctcagaccacagtgcaatcaaattagaactcaggattaagaaactcactcaaaactgctcaactacatggaaactgaacaacctgctcctgaatgactactgggtaaataacgaaatgaaggcagaaataaatatgttctttgaaaccaatgagaacaaagacacaacataccagaatctctgggacacatttaaaacagtgtgtagagggaaatttatagcactaaatgcccacagaagaaagcaggaaatatctaaaatcaacaccctaacatcacaatgaaaagaactagagaagcaagagcaaacacattcaaaagctagcagaaggcaagaaataactaagatcagggcagagctgaaggagatagagacacaaaaaacccttcaaaaaaatcaatgaatccaggagttggttttttgaaaagatcaacaaaattgataggccgctaacaacactaataaagaagaaaagagagaagaatcaaatagatgcaataaaaaatgataaaggggatatcaccaccaatcccacagaaatacaaactaccatgagagaatactataaacacctctatgcaaatgaactagaaaatctagaagaaatggataaatttctggacacatacaccctcccaagactaaaccaggaagaaattgaacctctgaatagaccaataacaggctctgaaattgaggcaataattaatagcctaccaaccaaaaaaagtccaggaccagatggattcacagccaaattctaccagaggtacaaagaggagctggtaccattacttctgaaactattccaatcaatagaaaaagagggaatcctccctaactcattttatgaggccaacatcatcctgataccaaagcctggcagagacacaacaaaaaaagagaattttagatcaatatccctgatgaacatcagtgcaaaaatcctcaataaaatactggcaaaccaaatccagcagcacatcgaaaagcttatccatcatggtcaagttggcttcatccctgggatgcaaggctggttcaacatatgcaaatcagtaaacataatccatcacataaacagaaccatcaacaaaaaccacatgattatctcaatagatgcagaaaaggcctttgataaaattcagcagcccttcatgctaaaaactctcaataaactaggtattgatgggacgtatctcaaaataataagagctatttatgacaaactcacagccaatatcatactgaatgggcaaaaactggaagcattccctttgaaaactggcacaagacagggatgctctctttcaccactcctattcaacatagtgttggaagttctggtcagggcaatcaggcaagagaaagaaagaaagggttttcaattaggaaaagaggaagtcgaattgtccctgtttgcagatgacatgattgtatatttagaaaaccccatcgtctcagcccaaaatctccttaagctgataagcaacttcagcaaagtctcaggatacaaaatcaatgtgcaaaaatcacaagcattcctgtacaccaataacagacaaacagacagccaaatcatgagtgaactcccattcacaattgctacaaagagaataaaatacctaggaatccaacttacaagggatgtgaaggacctcttcaaggagaactacaaaccactgctcaacgaaataaaatgacacaaacaaatggaagaacattccatgctcatggataggaagaatcaatattgtgaaaatggccatactgcccaaggtaatttatagattcaatgtcatctccatcaagctaccaatgactttcttcacagaattgggaaaaacgactttaaagttcatatggaaccaaaaaagagcccagattgccaggtcaatcctaagcaaaaagaacaaagccggaggcaccatgctacctgacttcaaactatactacaaggctacagtaaccaaaacagcatggtactcataccaaaacagagatatagaccaatggaacagaacagaggcctcagaaataacaccatacatctaccaccatctgatctttgacaaacctgacaaaaaccagaaatggggaaaagattccctatttaataaatggtgctgggaaaactggctagtcatatgtagaaagttgaaactggatcccttccttacactttatacaaaattaattcaagatggattaaagacttacatgttagacctaaaccataaaaaccctagaagaaaacctaggcaataccattcaggacataggcatgggcaaggacttcatgactaaaacaacaaaagcaatggcaacaaaagccaaaatagacaaatgggatctaattaaactaaagagcttctgcacagcaaaagaaactaccatcagagtgaacaggcaacctacagaatgggagaaaatttttgcagtgtacccatctgacaaagggctaatatccaaaatctacaaagaacataaacaaatttacaagaaaaaaacaaacaaccccatcaaaaagtgggcaaaggatatgaacagacacttctcaaaagaagacatttatgcagccaaaagacacatgaaaaaatgctcaccatcactggccatcagagaaatgcaaatcaaaaccacactgagataccatctcacaccagttagaatggcgatcattaaaaagtcaggaaacaacagatcctggagaggatgtggagaaataggaacacttttacactgttggcgggagtgtaaactagttcaaccattgtggaagacagtgtggcaattcctcaaggatctagagctagcaataccatttgacccagtaatcccattactgggtatatacccaaagcattataaatcatgctgctatcaagacatatgcacactattcacaatagcaaagacttggaaccaacccaaatgtccatcaatgatagactggattaagaaaacctggcacatagacaccatggaatactatgcagccataaaaaatgataagttaatgtcctttgcagggacatggatgaagctggaaaccatcattctgagcaaactatcacaaggacagaaaaccaaacactgcatgttctcactcataggtggtaattgaacaatgagaacacttggacacagggtgggggacatcacacaccgggcctgttgtggggtggggggttgggggagggatagcattgggagagatacctaatgtaaatgacgggttgatggatgcagcgggccagcatggcacatgtatacctatgtaacgagcctgcatgttgtgcacatgtaccctagaacttaaagtataataaaaataaataaataaataaataaataaataaaataaaatcaggagaaaaaaaattggccagtcatggtggcaggtgcctgtaattccagctactcaggaggccgagacaggaaaatcgtttaagaccaggaggcagagattttagtgagctgaaattgtgctgctgcactccagcttcggcaacagagtgagactctgtctcaaaaaaaaaaaaaaatgcacatgccctttatatgtaaattttcattttagggaataagttcacatcttcttaacatatattattttggtgtttttagacaattccagttcaaaattcctctccaggtacatttacctgaagaaatctgcatctctggtctaatgcaagatctggtttccaggctgggcgcagtgactctcgcctataatcccagcactttgggaggccgagatgggaggattgcttgagcccaggagtttgagaccagcctgggcaacatagtgagattatgtaaaaatacaaaaattatccatggactagtgggtgcctgtagtcccagctattcgggaggctgaagcaggaggatcactcgagcctggaagtcgaggctgcagtgagctgtgatcaccataattttactccagcctgggtaacagagagacaaccagtctcataaacaaaacaaaacaaaatctggtttctagagtttatagaatcatacaacagcatgtttcatggagcgttccatctcacaaggtggtgtttggtttagagagggttatgtatgccctctgatattctcaaatctttatttaaaatgctgggagagttgctatctggctttgcatcagtgtttaatataatagccatccttttggggtgggtgttgacgaacagcacacctgccatcttccaaattataccccacactttgtcttgttgaatattattaagatataaagacagggaagaccttccatttccctcccacgtccccaccacctttagttgggagcacagatgtccctgaggcactgctatagaccatgaggtcaccgcaacacaagggacatcaaatgggattgctctggctcaaaacagccagtcttaattctggtgcgatgaatggctttggtggtcgtcccagataagaacattcagcgtcagcaagaaaggctgtaggtatttggctgaatgtaatgttttgttgttgatgtgctgttgtttttcttttcctgggtgtgtagtaggagttgcaaatgcgggctgcagattagcaacgggaaccatctgggtgagcctagcagggaccagccctcccatgggagagagaggtgacacggagcagctgatgctttcgtaatgattcgaggcagctgccaaaagaggcagagcctttgcagaacagcctgtctgttctgctcctagacattagagagataatacggctgataggtgagttggggaaggcttgtttggacacattttctcagccttttttttttttttttaacctctggtagaaacgggcatagttgaaagatccattgacctattgtattctgaaactcaatggatcatcagcttaggcactgagaaatggattccaaaccaattttagtgtgagcaagtttctctcctttctgttactctcataccctttcttctttcttccctccctccctcccttcctttttctttcttaaccaagaacgtgtgtgtgtgtgtgtgtgagtgtgcgtgcgtgtgtgtctgtgtagtgtgtatagtatgtgtccagagtatacatgctttggaacaaaatgaatttaaggaggaatgcgtttgtattttgtccttagtgttattttaaggtacaaatatgggtaataacttgcagactacagatgggcttttctttcattgtaatgcatttggctgtcatatcccttagtcctaacccctctgccactgccaactaaatataaccattagtcattcagtggtttctgcattttgtagtcaaaaaagagggagctcattttgattaattgcctctttccttattcaggacacagaagctttctgagtttaaacttttaggcttggcaggacattgagacaatgctcttgggccagcatgtttcagggcaggttttgccactgagacaattcatccaagagccccaggacttggggcagcaggagttcttttaaaaatgggccaaaagacgggcagagcacttgaggtcagcagttcaggaccagcctggccaacatgctgaaaccccatctctactaaaaatacaagaattagccgggcgtggtggtgcacgcctgtagtccccactactcaggaggctgaggcaggagaatggcttgaacccgggaggcagaggttgcagtgagctgaggttgcaccactgcactccagcctgggtgacagcgagactccggctcaaaaaaaaaaaaaaggtcaaaagaatgaactcattgaaagttcaggatttgtgcagtagtggccttggaaaatcaatttaaaaatgtcggaattagggatatggctcacaagtctagtgtgaatttcatgctgggaactaatttaattgacacatgaatgatactttttttttttttttttggtcttttaaatcacgtctgtgtcttctgccaaagacaacaagaaggtattccaagctgcacaatgaggcccaggtaggtaaagccatatactgcattgtgagcacattgaatctaatgtataattctgtgtatttgtgaatccagccttataggtagaggcatttaatatcatctgcctttttttcttttttctttttcttttcttgtaacctactatgagtcaacatgctgtctttatatggctggccataagatgtctaagttcattctctcgacttagtaagtgtgtaagttttttaaaaaggtaggagttaggcaattgatagagatgtaaactgtaaatttccaacagatacatatgagtttatgtttatttttatttattttagagacagggtttcacagggttttgctctgtcacccagggtagacgacagtggtgcagtcatagctcactgcaacctccaactcctgggctcaagagatcctccagcctcagcctccagagtagctgggacctcaggtgcttatcgccacgcccagctaattttttatttttattttttgtagagacaggttctcattttgttgcccaggttggtcttgaactcctgggctcaaggaatccccccgcctcagcctctcaaagtgctgggattacaggtgtgagccaccattgtgcccagccgtatacatgattttaaagtgttgtaaaaacaggaggtgaaaaaattcaactaactttgcatagatgaaaagcatttctataacttcggggatttggcccacagtcctgagcatgtagcttttgcctgcaagacattctcaatcttcaaggagatgtttgcatacagcaaaaaaattgtactcttctgtggctgtcattgtttcagagtatttacaaaggactctgagagccaatagggatgaactcctgtttgtattttttctctcagaggagatatttgaagtgggttttgaaacatgtatagacatgagataggaattgaatcaataatccacatgtccaatattcattacctgataactgagtagggatatgctgagaagagcgtcatgtgtttccttaagaaaatatgacctcagctgggactgagcaaaactatgaagtggactcaggtggtcctcagagtccacgtttctttcttttcctcaattcagttctttccccaacttccacttttcctttacttggtaattccttattttattttatttatttatttttttgcttgtttttcttttctccagccaaagctgctattctcacactttttcttcttttgagggtctcgtcctgtagcccaggctagagtgcagtggcgcaatctcagctcactgcaggcttgaactcctgagctcaagcgatcctcccacctcagcctccagagtagctgggactacaggcatgcaccaccacacccagttcatttttacatttttttgtagggatggggtctcactatgttacccaggctggtgacgaactgattctcctgcctcagccccccaaagagctgggattacaggtgtgagccactgcaacctgactttttaaaaatttggagtaatgataaattgcatgtatttattctttttatattatgaatattttatttttatttattttttctttctttttaaattcatttttctttttatttttttcctttttaaatttctttttctttttttattgtcccttgagtcaaaaaagctgacatataaacattgcatagatttatggtgtacaacttgatgttttgaaatacgcctgcattttggaatagctcaattatgctaatgcatgttacctcatccacttacctatttgtgatgagaacactttgagtagattttatcagtaattttcaactctaaaatacattcttattaactacagtcagcacaagtacaatagattctttgaacttatttctcctgtcaaattgaaattttgtatccttcgaccaacatctccccaacccctccactggccccccagctcccagcaggcatcattctaccctttccttctatgagatcaactttttgagatttcacatagaagtgagatcatgtggtattggtgtttctgtgccaggcttattttccttagcataatgacctccaggttcatccacgttgttgtaaatgacagaatttcattcttttttaacgctgaataatattccacggtgtatatgtaccgcattttctttatccattcatgcaatgatggacactgaggttgatttcacagtttggccattgtgaatagtactgtaaggatcacacacacccacacgcccttaaattagaataaaaattctaattttagaatgaagttaaggttaaatcccttacctgtagagactcatttaagtcccttaaatgaggttaagtccctggaagagggagttaacctcaggagtcttatcgtctccgtcctctgcaatgatttgcccctgagtacgtgttttcagacttccctcctggaagggcatctactttagccttttaaaaaaawttcaatagtttttggggagcaggtgatgtttgattacatggataagttctttagtggtgatttgtgagattttgatgcacccatcccctgagcagtgtacactgcacacaatgtgcggtctttgatccctcactcccctcccaccctttccctgagtccccaaagtccattgcgtcattcttatgcctttgcagcctcatagcttagctcccacttatgagtgagaacatacaatgtttggttttccattcctgagttacttcacttagaataattgtctccaactccatccaggttgctgcaaatgacattattttgttcctttttatggctgagtagtattccatggtgtgtgtgtgtgtgtgtgtgtgtgtgtgtgtatgaatatgaaaatttgatatggatagatacctgcagatctatacagataaagaagatgtgttatatataggtatctacagatctatagatatcaagagtgtctcgctccaagcaccaagcactgctgctgaatggcagcagaagtgcccaaagaaatgcgctcttggcttctcactttgtatacaatctatagctatctatctctatatatcacattttctttatccactcattgattgatgggtatttgggctggttccacatttttgcarctgcaaattgtgctgctgtaaacatgcgtgtgcaagtgtcttttgttgttgttgttgttgttgttgttgtttttgatggaacctcggtccgtcacccaggctggagtgcagtggcacaatcttggctcactgcaacctccgcctcccgggttcaagtgattctcctgcctcagcccccctagcagctgggattacaggagtgtgccactacactcggctaatttttgtacttttagtagacacagagtttcaccatgttggccaggctggtctcgagctcctgacctcaggtgatccacctgcctcggcctcccaaagtgctgagattacaggtgtgagccaccacacccggccgcaagtgtcttttatatataatgccttcttttcctctgggtagatacccaggagtgggattgctggatcaaatagtagatctacttttagttctttaaggaatctccatactgttttccacagcgcttgtacattcccactaacagtataaaaggattcccttttcactgcatccatgttaacatctgttgttttagcctttattttatgcaaagtgagaagccaataacgcattacgttgggcacttccgctaccattcagcagcagtgctcggtgcttggagagagacactcttgagcttcaggagatgcctgggagatccacgtgatctccaaagacccctgttgtgttgtgttgggaggtggatcctgaatccacccagagaagcctgataccaataaaatccctgcttgctttccaggagacccttggtcttcatgtctttggtgtgtgcactcttgaacacatgccaggcacacagggtgcatgacgacaagcctaatattgtcctaatcatggttgatgacctgggtattggagatctgggctgctacggcaatgacaccatgaggtaaggcggtttcatggccagtcatacgttcgtcagtcgttcaggttcagcaggctggctgtacggctgcatctatgtgcaaaaccaaatgtatttgttgggacttttttttaagttactttaaactttttgatagttttaaattatttagattatgtaatagttttacaattacatttttaataattttaatttgaatctctttcagtttttaaacttaagaaataataattgtccatcttcacagggtacacagtgaggtttggatacatacaaagtatagtgatcagatcagggtaatcagcacatccagtgcctctagcattaaccaggatggtcatagtaaaagcatggctatctggacccgagtcctggctctgcatttactagctctgaagtcttagagaagtcgctgaacctctctgtgcctgttttcttatttgtcgaatgcagagaaggctttatatccctgagtttatgtgtgtaaagaacttagaatagtacctaacacacaactaccctctatcatacagcctattatgaagcatgatgattgtatgtacatgtacatatacagatatgaacatataaatgtcattatataaatatatgtgatatattcatatatgaatatattctataatatataaagtatatatcatacatttattatattacatatccatatattatgaatatatgaacatacattcaatgtataaacatatatgaatatatttataatatatgaatatataatattactaatatatatgaatatgttattcatatatacatgaacatatacatatttctatgtctatgaatatatattcacttttatataaatgtatttttaaaaattaaatataaatatatttaaataaatatataaacatatatttatatattttataaaagtacatttaaataaatatatgtaaatatatattcattttatataaataaatatttatataaaatgaatatatcttcatacatattgataatatataaaagtatatattatcaatatatattgataatatataaatatatatttatatataatatataatattcataataggctgtatgatagagggtagttgtgtgttaggtactattctaagttctttacacacataaactcagggatataaaggcttctctgcatttgacaaataagaaaacaggcacagagaggttcagcgacttctccaagacttcagagctagtaaatgcagagccaggactcgggtccagatagccatgcttttactatgaccatcctggttaatgctagaggcactggatgtgctgattaccctgatctgatcactatactatatattaataaataaatatatattatttattaatatatatttaattatacatatataaatattttaatataaataaatataatataaatatttataaatatatttataaataaaattatatataattataaatatataattaaatatataattaataaatatatattataaatatagatttataatatataaatatatattaataaatatgtatgaatttatgaatatatattcaattatatatattcataaatatataaatgtgaatatgtatattcagcagaattcattctgtttcctaatttggtgagccaatagattctttaagatggtgagcttgtatttttaacaatgggcattctgaaagaagaaaaacagatatgaaacaaactcagtgctttgtggtggataatagaagctatctgtattagccattcttatactgagcttaggagtacatcgttatcagacrtacatcatacacttttaagatcattgcgttgtatgactaatagatgctgaaggtagtcatcacagttttcgacaacggagctaggagtcatgaaaaagtagtcgccaaaaattaaccattgcttatgagaaaagaagagaggactcaccgaaaagcgcagaaacatggtgtccataaatggcagatatttacagagagtatgttagcgtggggtatcggtgttttgctgaaaatactagcaatttgagaagtgagattataatgtgaaatctaaaaccaggcacatgtgccccaggaatgcagtttacaatttttttctttgcaaaataaataatgttttaaaagttggtaggtgacttccatatctgaaaaaaaaatcagatgcacaccttggtaaagctggaacttctccttgcaccagttacctgtcataatttctctcatgaataaatgtagaactcattatattttattttcatccaagaggagactgattctttttccagaagtctctccagcctccagaaatctcttgttaaattattttttaattgacgaattatagttctgtgtatttctggtgtacatcatgatgttttgattcatggatccattgtggaatagctaaatcaagctaattaacatgcacaaccacacatacttattatttatatgtggtgaaaatggtgaaaattatagcaatttcaagaatagaatacattgttattaactatagtcaccacaatctgcaacagatctcttaaatttattcctctatgtgaggaataaatcaaatagaggatttattcacgtttggctccgtgaaatgttgtatcctttaacctacctgttctcgaccctcaccccagcgcctgatacccaccattctactgtctacttctgagtttgctattttagattccacacataagtgagatcatgcggtatttgtctctctgtgcttggcttatttcatttaatctaatacccttccagttcatctgtgttgtcgaaaatggtgggatttccttcttttgaatatttaatcatatgacagttttgcaacctatgyagactgcagggaaatgtatctatcaaaccagtgagtgggtgggtctgtgagtagttaggcataagtaaggtctgtaagcaattagcctcgatgaatcagaccccaatcccttaagcattttattttgtaaggctgaagtacagtgaatggacaccatatagtggcacccaggtatatgaaccctgcagaacaacagctgcctggaatctcagtcatacttcaccttgacacgggcaaaaaagaaaaatgaactccgtgtgcagttacctgctctgggtacctggaaatcataataaacagagatgttgtttatcttcagatctctctgtctctctctctgtctctctctctcctctttctgtctctacatctctttctatgcctatgcgtgtctctgtcacccctctctgtctgcttgtctctctttctatctctctctctgtctctctctgtctccctctctttgtctgcctgtctctctatctctctctctgattgtctctctctgtctccctctctttgtctatctcattctatccatttctttctatctctttctgtctctctctctccctctctctgtccttctgtttccatctgtctctccatctctttctatgtctgtctctgtcttccccctttctctgtctgcttgtctctctatgtctctctkattgtctgtctctgtctctgtctctctctttgtctatctcactctatccatttctttctgtgtctttctctctttccttctctctccctctgtctgtatctttccatctctctctgtctctctcttcctctcttcttctctctctccatctctctctatctctctctgtgtctctttctctcttttcatctctccctgtttgtctctctctgtttttctttctgtctccctccatctgtctctctttttccacctctctttctgtttctctctgtctccctccctctgtttatctctctttccatttctttctgtctctctcttaatctctgcatgtctctttccatctctctctttctgtttctctctctctgtctttctctctctctcttgtcttctctctgtccctctctgtctttctctgtctccctctttctgtctttctctctccttttttctgtttgtctctctctttccatctctctctgtttctctctgtgtgtcttaccctttgtctctttctctgtctcttttcatctctctctttctgtttttctctttctatccttttctgttgctctctttctcgtttgtctctctctcttttcatcctttctttctgtctgtctctctctctgcctcgctttctgggtctctccctctctccctgtctgtctctcctctctctttccacctgtgcctttctgtttgtccttctctgtcttcctctcgctcttcctctctgcttcccccgccccccaccttttccttctctccaatacaccttccctctcccccttcaggacgcctcacatcgaccgccttgccagggaaggcgtgcgactgactcagcacatctctgccgcctccctctgcagcccaagccggtccgcgttcttgacgggaagataccccatccgatcaggtgcgcaaactggcgggctctgctgggctctgccctcatgttaggatgtgaggaaacaaaaatgtggcttgaccacgttaacaagtaaaaaagggctgggcacgatggctcacgcctgtaatcccagaacttcgggaggccaaggtgggaggattgcttgagcccaggagtttcaaaccagcctgggcaacagagcaagaccccatctccacaaaatttttttaaaataagttgagcatggtggcatgtgtctgtggtcccagctacttgggaggctgaagtgggaggatcgcctgagcccgggagtttgaggctgcagtgagtgtgatcacagcattgcactctagcctcgttgatagagcatgtattagaaagaaaaaaaaagatacaaaggaaagaaaagaaaaagcacacatgtgcataggtgcactggcacacacagctagcactggtcacatcaaaatggctgcgcttctcagagatgcaagatcaccctgtgtgcttcagttgtcttttgatgcaatgagagttttttatctgaattccaagtcacaaggtgtacatttgagtttcccaggtcaacaaagataagctgtcttggaatgaagtaattaatacaacatgtgtttacacattcagtctgtcaccaaaaaatatctttttttttctttcaaaccacaaagtcatggccgggcatggtggctcatgcctgtaatcccagcactttgggaggccaaggcaggtggatcacttgaggtcaggagttcgagcccagcctggccaacacggtgaaagctcatctctactaaaaatacaaaaattagccggacatgggggcatgcacctgtagtcccagctactcaggaggctgaggcaggagaatcacttgaacccgggaggcagaggttgcagtgagccaagattgtgccactgcattccagcctgggtacacgacggactctgtctcaaaacaaacaaacagcaacaacaaccaaaaacccacaaagtcataaaccaagaannnnnnnnnnnnnnnnnnnnnnnnnnnnnnnnnnnnnnnnnnnnnnnnnnnnnnnnnnnnnnnnnnnnnnnnnnnnnnnnnnnnnnntactgcctcagcctcctgggtaactgggattacaggcacgtgccaccaggcctgtctaatttttgtatttttagtagagatggagtttcgccatgttggccaggctggtcttgaactcctgaccttaggtgatccacccacctcagcctcccagagtgcggggattataggtgtgagccaccgcacccggccatatatcaattttagataaaacaaaaatgaaatgagaagaacgaaattatcgtaagctctagttgtcatgttctcattactttttaatttattactattattttgagacaaggtcttgctctgttgaccgggatgragtgcagtggtatgatcacagctcactgcaacctcaaccttccaggctcaggtgatcctcccacctcagcttcctaagtaactggaaccacaagtgtgcaccactatgcctggctaattttttaactacttagggtattgctgtgttccccaggctggtctcgagctcctgaactcaaaccatcttccctctttggcctccaaaagttctgggattacaggcatgagcaactgcacccaacctggtgactttttttgtttgtttggttttttgcttttgagatagggtctccctttgttgcccaggctgaagtgcagtgtcacaatctcagctcatcacagcctcaaactccagggctcaagcgattctccctcctcagcctcctgagtagctgagattacaggtacccgccaccatgcccagctaatttttgtatttttggtagagatggggtctcaccatgttaaccaggctggtcttgaattcctgagctcaagtgatcggcccacctcggcctcccaaagtgctgggattttaggcatgagccaccgtgcctggccaaaagtagctatttttaaatgtgctattcagtagcatgtagctctttcccaatattgtacaaccatcacctctatcgaattctagaacatttccatcacccacaaaggagatcttgtccccatgaagcaatcactccccattcccccttctcgcagcccccggtcaccaagaatccactttccgtctctacaaacatgtctgtcctggacatttcacataaaaggaattatacagtatgtgacagtctgtgactggcgtctgtcaccaagcataatgttttatggtagcctgggtcagagtttcatttatttttatgttgaatactattccctcgcatggattcactacagtttctccatccattcatcaattgatgggcagtcaagatgtttctattgtttagtgattgtgaggaatacaactatgaacatacatgtacaagtttttctttgaataccagttttcaatccttttgggttcctcaggaacctcaattcttttgacattccccaggagtgaaattgttgggttgcatggttctattttttttttttttttttcagatggagtttcactcttgttgcccaggctggagtgcaatggcgcaatctcggctcactgcaacctctgcccctgggttcaagcgattctcctgcctcagcctcctgagtagctgggattacaggcatgtaccaccacgcccagctgattttgtatttttagtagagacggggtttccccatattggtcaggctggtctcgaactcctgacttcaggtaatccccctgccttgtcctcccaaagtgctgggattacaggtgcgagtcaccacatccagtcatatagttctatttttaaaggtgagggaagtgggcttggggcatggtggctcacacctgtaatcccagcactttgggaagctgaggagggcagatcagttgaggccaggaattcaagaacagcctggccaacatggtgaaaccccatctctactaaaaatacaaaattagctgggcatggtggtacatacctgtaatcccagctactcgggaggctgagacaggagaattgcttgaactcaggtggcagcaggttggcagtgagctgagatgcatgccactgcactctagcctgggcagcagagtgagatttcatgtcaacaacaacagcaaaaagtaaaataaaaaaagcgtagagaaagggataaaaaaaaaagaaaaaaaaatggtgagggaagtagtcttcgcttgtgggtacagatgccgcagtttaatgccaaattatgtggattccagatagcggttcttggaggcagaataaaatcgcacgtatcaaccctactgccagtctgctgacactgactttggacgagaagaaagaaaaggtcttttttggctgagtgcagtggctcatgcctgtaatcccagcactttgggaggccaaggcgggcagatcatgaaactccgtctgtactaaaaatacaaaaattagctgggtgtggtggcgtgcacccatagttccagctacttgggaggctgaggcaggagaatcacttgaacctgggaggtggaggttgcagtgagctgagatggcaccgctgcactccagcctggtgacaaagygagacttcatctcaaaaaaaaaaaaaagatcttttcttagtctgtttgggctgctataacaaaaataccatagactgggaggcttatctacaacagacatttactgctcacagttctggaggctggaagtccaagatcaaggcatgccagattcagtgtctgctggggacctgcttcctggttcatacacggcgccctcttgctgtgtcctcacatggtggaaggggtgagggagctctctggggtcccttttgtaagggcactgattccattcttgaggctccaccctcctgacctcatcccctcctaaaagccctacctcctaaccattaccttgcagatgaggatttcaatgtgcaaattttgtagtgacaaaaatattccctctgtagcaacacctactcattgtacttttttccacactacatctaggtatggtttctagtggtaatagacgtgtcatccaaaatcttgcagtccccgcaggcctccctcttaatgagacaacacttgcagccttgctaaagaagcaaggatacagcacggggcttataggtaagacacaagaattggtgttagtcattgatcataaggtaatcatgtcctttgttctacccttgatttatgactttcttggaaacactgtattttacaatgtcttatgtaaaggcgcagtggcccatgcctacaatcccagtactttgggaggccaaggtgggaggatcgctggaaaccaggagtttcagaccagcctgggcaacatagaaagaccccgtctctaaaaatataaaattagctaggcattgtggcatgtgcctatggtcccagctactccagaggctgaggtgggaggattacttgtggcaggacttcttttctttattattatttttaaaacagaggagtctcactgtgtcacccaggctggagcacagtggcacaatctcggctcactgcaacctccatctcctgggttcaagggattcttgtgcctcagcctctcaagtagctgggactacaggcgcgtgccaccacgactggctaatttttgtatttttagtagagatggggtttcatcatgttggccaggctggtcttgaactcctggcctccagtggtctgcctgccttggcctcccaaagtgctgggattatggatgtgagccaccacacctagtctgattcttcacacagctcagtgataggagatgttttaaaatgaatatattacaagaacataaaatttttctggctctgcctgcccgcatagtctctcaccgtgtatcctgtcatctgcctctttatttcactaaaaatggaccacacagattttcttctcactgccaaggatgatagaagtcctcagccacccagtagttggaactccaactactattcctgtttgggaagcctgggtttcagctggtgtgagaataacatgctgttttaaatcccttcaatttttgtaatacatctgctgttgataagagaaggcaatctccgtggggttgcaggacaggaagcctaagccagtagcactgcctctcctctacctatccccacaggcactcagaggttgatggaagcacaggcattcttgatggggccctcaccacatacaggaagctgttaatattcctagtagatacacattatcgcagcctctgagggtttgctgatcatccacatgctagcaggactcacaggcaccctttggtgatcattcaaggtgtggtacgttttactgaataagtcccttacttcgatcagttttaatgagagcccctaggatttgcagtcagccagctattcatccatccatgctggtccatcctccatgatttatctatagctatcatcggtcatctctctctctttctccatccatccatcaacccatatatctctatgcatctatccatccatctacctgtctatctatctacctgtttgtctattgatcaatccatcatctatcatttatctatcatctatgaatctatctacccatcatctatctatcatctataatctattcatccactcattcatctatcatgtatctatctatccatcatctatatctgtctatttatctagccattcattcatctatttagacatctctctatccattcacccatccacccatatatctctatccctgtctatttatctatctgtctactcacccatctatcctttcatccacctacatatacaaatatgctccatctgtcctccatcatttatttgtacgtgtcatatttattacatctatgtctctattgatatatacatacacatatgtatacatagatgcatactccataatttatttttatccatatcttacctgtctattcatccacccacaacacagatctattcatgcatctctctatctaatcacccactcatccaggtatccatctgtccacctacacacacatatatacatgctccatctatcctccatcatttatttgaatctgtcctatcctatcttatctatttatctatctatccatctatccaactactcactctatctctatcatctatttatctatctatccattcatctatcaatccatctatccatcatatctatctatctatctattcatctatcctatctatctatccacccatagatctccatccacctatctactcacctactcagccacccacctatctatccatgcatccacttacacatacatacatgccccatctatccatccatcatttatttgtatctatcatatttatcacatctatctctctattgatatatacatacacatatgtatacatagatgtatacaccataatttatttttatctatcatatcccatctgtctattcatccacccacaacacagatctatttgtgcatctatctaattagctagtcatctatcgatccatccatccacctacacacacatctatacatgctccatctatcctccgtcatttatttgaatctgtcctatcctctcctctcctctatcctatctatctatctatctatctatctatctatctatctatctatccatccatccatccatccaaccactcactctatctctatcatctatctgcctatctttctgtctacatattatctatcatctatctttctttctatcatctctatttatctagctagctatatctacatatgcatctgttcatctgtctatctacctatctttctgtctacatattatctatctatatatctacctacctatcatctctagctagctagctagctctatctatgtatacatctattcttccatcaactataacctgccttgtctctgtgatgtatctattcttccatcatctgtaacctgccttgtctctgcggtgtatctattcttccatcatctgtaacctgccttgcctctgtgatgtctctatctttgtggctatgactttgtcttctcagtgaatgagaaaatttctagttcacgtcattgacagaaactcacaattctatttttctcccttattgtttatcctatcctgttgctcacaaccggatctgaatacaaacttcctctgtaaactaaagaagaacaaaaaaaatgtggctaagtggcactcggattttttagaggaaggagaatatctctgctactttatttttgtgtattagctgattgtttcacgtgaagaatgctcacatggtytttgcaatgtgctggcatatgttgacatattgatgcgtagatgtgtttgtgtgtttggttttaggcaaatggcaccaaggcttgaactgcgactcccgaagtgaccagtgccaccatccatataattatgggtttgactactactatggcatgccgttcactctcgttgacagctgctggccggacccctctcgtaacacggaattagcctttgagagtcagctctggctctgtgtgcagctagttgccattgccatcctcaccctaacctttgggaagctgagcggctgggtctctgttccctggctcctgatcttctccatgattctgtttattttcctcttgggctatgcttggttctccagccacacgtcccctttatactgggactgcctcctcatgcgggggcacgagatcacggagcagcccatgaaggctgaacgagctggatccattatggtgaaggaggcgatttcctttttagaaaggtaagcggaataattacaaattcatgtaataatgataatgatctcttttttaaaaggacctagatagatctgtagggtgattgtagtttataataatctattgtacacttctaaatagctaaaagagaataagtcaaatggctctagaataaagaaaagacaaatatttaaggtgatggacaccccaattacactgatttgaaaaaataaatcatttgtaataattctttacaaattatatgaatgtattaaattgtaacgtgtactcttaaactatgcacatctataatgcattaataaaaataataggggatgatggtattaaaaatattgagttaggaaatggaatattgctaaatggtgtaatagggttagataaaaatatgaagtgtattgaagaccagttggactcttcagttggtacctaaagcggtggtaccttgtttgggctcctgttattaaaatcatggcctctctattggctctgaaatttatatgttgtcagaccatggacgcagaccctagtaacttaaactcacaaattgtttacgttaatttacaatgcatcttgtcatcatgttaacttacaacagggaatatgtacatatacaatatgtatatactatactatatatgtatatatataatatattttataatattttttgtctggttccctgatacatatagataaatatatatatatatctggaaatcagatgaaaaaagtaagttttccattgcattatgttcctgttgttaaaaaacaaaaaaaaagctacttggggaaattaaaatcagaaggcttctctttgagcatgtgatacgtaagggctatttcatgaattggatgaggtaaatggtcaaaggtgattgttataaaaactttatgcatccagaacacaatgactggaaattttcaagggtatctatcctcttgttgttggaccttctttctttaaaaaaagcctgtaaacacattttttcatttgctttttccatattgattgaggcttaatctttaccaatagccattctaggatctggattttcaggatgtaaggtgtcttgtgtactctggtacatagctttgtcctcactctgtagcccaagtgaaggtgataaatatgtagtttggggctggcagcggtggctcagcactctgggaggccgaggagggtggatcatctgagaccagcctgaccaacatagtgaaacgccatctctactaaaaatacatattagctgggaggctgaggcaggagaatcgcttgaatccgggtggcggaggttgcagtgagctgagatcacgccattgcactccagcctgagcaacagagggagactctgtcttaaaaaaaaaaatgttgtctgggagtaataaagccatacttgctctgtagatgcaactgaatgcttggtgtcacttagagcaaatctttctgttccctggtacctttccaaatgtgcagagttctatgaatttttacagacagagcatcaatatgtgcaaattagcaccaaccactctgaaagtatatgataagcaatcctattctcttctgtctgccagttcgtcttcaaacattcccacacagttctccttaggaatttacatgagtacttgaagaacagatcctatggttgagatgtacattgttcaccaaaacctctgtcgagtttcaaaagttccatatgatccacaataacacaatattgaatggaaaaaacaatggtgaagaggaaatataaagacttggacgttgtgacaataagctcatggcttaggttcatgaatgctcaaaactatttttatctggattctcagtgtatgactctcctacagttgctataacaaatcactatagggctgagtccaatggctcatgcctgtaattccagcactttgggaggctgaggtaagcgatcacttaarttctggagattgagaccagccaaagcaacatatgggagccatatttctacaaaaaatacaaaaaattagttggatatgatggcatgcatcagtagtcacagctactcaggaggctgaggtgggaggattagttgagcctgggaggttgaggctgcagtgagccgtgattgcaccactgcactccagtctgggcaacagagtgaggccctgtcttaaaaaataaaaaaaattaccacaaatgtagtggcctaatgcaacacaaagttattattctgctgttcttgaggtaagaaatccaaaattaaacttgtgggctaaaatcaagatgttggtggggctagttacttctaggggttctaggggagaatctgttttctctttcttctagtttcttgaagctgcctgcattctttagcttgtagggttttgttttctgactcagacccttctgcatctctcttataaaaggacatttctgattccactggacctacccagataacccaggataatcactttgtctcatgatccttaattcattcccatctgcaaaaaccttttaccatgtaatatcacatgttcacaggttttgagaatkaggatgtggatatctttggaatggggcattattcagctgatcactttgaccacgactctttattttggcagcttagtttgggatgcaaactatttaattttaaatatttaatgttcagagctgtgcttcctctgtaggctctaggggaggattcttcctgcccttccccactcctggtggcttcaggcatccctgggcttgtagccgcatcactccagtctctgcttcatctgcatatggccttcccctctgtgtttgtgtctcatcttctgtctcttataacgacaatagtcattggatttagtgcccatcctaattccaggatgagctcatcttcagatccttaattaattacctctgcaaaggtcttgatatccaaataaggtctcattccaggttctgggctttaaaatatatggacttatatttctgggggctactattcaaactactacaattgtatccagtttcttctggaggctctaggggaggatctcttctgcctcctctagctcctggtggctccagatgccccttggctggtggttgcattactccatttccacatggcctcttcttctgtgcttgtgtctcctcttctcctatagggacaacattattggattggggactcatcctaatccagaatgatcacatcttaagtaattaaatctccagaggccccatttccaaataaggtcccattctgaggtttcaagtgaacgtgaattttgaggggtcactgttcaagacaccatgacataagtcttgtttttaaaattcattttttttatttctttatattttgatatctcaccagagcagaaatttcccaacgaatggcatttgtgctgtgtgttttcctgggtagctgaggacttatcattcatgcagatggattatcaaaattaacagcgggtcagcctagttccctgtatcctcatgtgagaacctacagggtgcaaatggcttgccaaggcattcctgtttgtactggcttatggctcgtgaaactcttgatctggctaagaaatgacttccataccactgtctcttgatgtatctcagggtgtgaccctagtttgaggcttcacgagcagtgagaacatccaccaaacagagctggatttgacttttcgcactcgcatgatatgggaggtccgtgttggcttgcagtatattctacagctgtcctggcatctgagaatcaaaggaactgtgatggtgtcacaggactaccaggttcatatgcctgctgcacagtaacataccaatacactgaggcagcagggtttatggcagagaaaggtttaataattgcagggcaattagtgcgaacatgagaggagacctcaaatccatctttttttttttttttgagactgagtatcactctgttgcccaggctggagcgcagtggtgcaatctcagctcactgcaacttctgcctcctgggttcagcgattctcccacctcagcttccccagtagctgggattacaggagcccatcatcatatctggctaatttttgtatttttagtagagataagatttcaccctgttggccaggctggtctcaaactcctaacctcaggtgatccgccatcttcagcctcccaaagtggtgtgattataggcgtgagccactgtgcctgtcctcaaacccatccttccaaggagttctgggctggattttttaggggaatcatggagggtcttggggtcactgatgggttggggtaagagggaatggaatcatcagaatatggaaatggtatgctttggtaagtcagcttctcatagggtccttcagagaagcagacatcagcagtttccctggtatgcacaacctgaaagattattgcaaatggaaaacttaacatttcatgatgttatgttatcatcctgtaacaggatctgtgcgattctagaacaaataggtaccaaacaagtaggaatacatagatgagagggcaagctgacctcaggatcaaagctgagtatgctgcaagcttagttcattttgtttctcccgctcccttcctctctgattgattttatgaagtttatagagatggtttcagtagcattaccaaaggggttagggagcagttgaggtgctgcaggatcatggagtccattctatgcaggatggggcccttgggtggacccactctatcttctgcagcttggagaagaaggaagcaggtcatgtctatgagaagccaaaacaatakttttcacattcatagatattgaaaactcacaagtagtttcattgatgtcttctcaggcacagtaaggaaactttccttctctttttctcctttcttcacgtgcacacacctctccccaccacggacgatttcactggcaccagcaagcatggcttgtatggggataatgtggaagagatggactccatggtgggtaagtcacaggacttaagtggacagaaactaacgtgttctgataggacaggacacctgaaaactgctcttggtcaacctgtagagtgaagagaattatgcctatgggacagagtggtctgagacattaatgaggtaatagttgctagcaattgagaaagtcagcaaaaaaactatatgcatttcctctcctttctttgcatgctgtccacttatcaacttgggtctttgtctacttgactgcgtctccagtgctggccagataacaaatcaaatcttcttttcaaaaatttcaactcttgttttagattcagggagtacatgtgcaggttttttacctgggtgtattacgtgatgctgaggtttaggatatgatcaaacccttcacccggacactaagcatagcacgcaatagttagttttcaacccttcccccactccttccttcacccctctagtagtccccagtatctattgtactgatctgtgtgtccacatatacttgatgttatgctcccacttattttgtttcatttttaaaaataaattttattgtgtattttaagattcacaacgtgacgttaaaagatacgtatagayagtaaaatgattactatagtgaagcaaatagtaatcattaagtaacataatatagtaatattaagtaatagtaatatagtaagcaaaagtatctatcatctcacactgttacttttttgtgacaagatcagctaaaatctatttaacaaaagtccagctgagcacagtggcttccatctgtaatcctggcactttgggaggctgaggcaggaggatcacttgagcctaggagtttgagaccagcctggacaacatagtgagaccctgtctctacaaaaatacaaaaattagctgagtgtggtggcatgtgcctgtagtcccagctacttaggagactgaagcgggaggattgcttgagcccataaattgaggctgtagtgagccatgattgcaccactgcactccatgcactccagtctgggtgacagtagctcccacttataagtgagaacatgcagtatttggttttctatgtctgcattaatttgcataggataatgtccaccaccggcatctatgttgctgcaaaggacatgatcttgttcttttttatggctgtgtaatattccatggtgtatacgtaccacattttctttatccaatccaccattgatgggtgcctaggttgatttatgtctttgctcttgtgaatagtgctgtgatgaacatatgagtgcacatgtctttttttttttttgagacaagatctcactctgtcactcaggcagaagtgcaatgacatgatctcagctcactgaaatctctgcctcctgagctaatgcgattctcctgcctcagcctcctgagtagctggggctataggcacatgctactgcgcccggctaatttttgtattttttgtagaggcaaggtttttccatgttacccaggctgctcttgaactcccaagctcaggtaatatgcctgcctcagcctctcaaagtgctgggatgacaggcatgagtcactgcacccagcccacatatctttttgatagaaagagaaatcatattttcagactctttagtgacatagccaaactttatttcaggtctgttgagcaccaatatcttagttggggattgggaattaactggtaagtcagaatccagtaccctcatgaactcatcctgtagagagaacaatgtaaatgggacgtcctaggacttacatggtaaatgtattgattagcaaaatggctttaattttccaacattaatgaaagaaaaccatgagtgaaactcacatatatgcaggacacaaatttaaagtataatattttccagacacagatattgtgaaatatatgtcactaaatagaaagacgctttggaaaattaagcctggaaaaagcaaagccaatttgcatagtcttaaacacataaaaaatatgaagtatttaaaaatataaataatattcaaaccaaatacatgaacatgaatagatgtttatgtaggtataagtgtgtgtgtctgtgtctgtagtgtttgtgtacatatgtatagaaacagatgattgacagagatagatgatggatagatagatgataggtaaatagatgatagatggatagatagatgatggactgatagatagttgatagatgataggtagatagatagatgatggatgatagatagatgataaatagacgatagatgatcgatagaaagatagatgattgagagatagatacatagataaacagatgatagatgacagagagacagatgatagattgatagattatagatggatacatgaatagaaagatgaataaacagatatatagatgatagatggatagatatatagataagtacatgatacatatgacagatgatagatgacagataagataggtgattgatagataagatagatagatgataggatagattgacagatacgtagatgataggtaggtagatagatdatagatacatacatacatacatacatacatacatacatagatrcatagatagatagatagctatgcatacccctcttactttctgcctccaccagcactagtccttaaagtttagattcttaatattgcactcaatctcaaaaatcgtggcgatcctatttttgatttgatctttgaaaatcaatgaaataggtcattcaaactcaggctgtgataagtaaaagacattactatttgctttaaaaatttaaattaacaaagctcccaaagtatctaatttaataaamctgatgatgtgtcatagtgttcaaacaaggcactttgggtatgactttaatttcgatgggatttttctggtgacattcagataatattacgcaaacggatgggtgtgttgaatctggttggacaagctgtgatatctgaaaattatattttgaaaaagcgcaactgagatgtacatgatactggtgcccagaggttttgaatgttttgtccacacagccagaatcaagcctttaggaagaataaacatctgctttaatatataattttagcaattctcaagcaaacatatatttaccctgaaattatttatcccagaagctgtaacaataccccaagtcctaagaattgttgcttttcttattagaaaagttgatttgtggccattcctggtagagatatcaccttcctgccttttataattatcataggtggccgggcgcggtggctcacgcctgtaatcccagcactttgggaggccaaggcgggtggataacgagttcaggcaatcaaaaccatcctggttaacactgtgaaaccccgtctctactaaatatacaaacacatccgtggtggcgggcgtctgtagtcccagctactcgggaggctgaggcaggagaatggcgtgaacctgggaggcagagcttgcagtggccgagatcgcgccactgcactccagcctgggcaacggagcgagactccgtctcaaaagaaaaaaaaattatcatgggtttcccacagcagtgccctgaaataatggagtctactgatagaataaacatttattttcattttttaataatttccaccttttattttagattcagggagtacgcatgcaggtttgttacctgggtatattgcatgatgccaagatttgaagtacaatagctcctgtcacccagggagcgagcatggcaaccaatagatagattttcagcccttgtcccccaccttccttctccccttttggagtccccagtgtctattgttcccatctttatgtccatgagtacccaatgtttaactcccacttatgagaacatgtggtagttggttttctttttctgtgttaatttgcttaggacaatagcctccagctgtatccatgttactgcaaaggatgtgattttgttcttttttatggctgtgtagtattccatggtgcatctgtaccacattttctttatccatgtagattggttctatgtctttgctattgtgaatagtatgataatcatgcaagtgcctgtgtctatttggtagaatgatttatttccctttgggtagacacccagtaatggcattgctgggtcagagggtagttctgttttaagttatctgagaaatctccaaagtgctttccacagtggctgagccactttatattccaaacaatagtatataagtgttgcatcttctctgcagcctcaccagcatctgttcctcttttatttttttgacttattgggttcgtgcaaaagtaactgaggtctttgtcattgaaagtaatgatagattgatagattatagatggatacattgaaagtaatgacaaagacctcaattacttttgcaccaacctaatagtagcctttccagctggtataataaacacttttaaaagtgatacttcctatgggccatgcactgttaccagtgtattctggatgaatccccacaacatccccggagacgagtatcatcttcatcatcatgtttatctccattcacagagaaggaggcaaaagtatgtggcctttggtggctgctcctggagataagccagggttgggctccaaagctcttactccctagctcagctacctcttatgcagggcaaagaagtcatgttgaatgatgaggaaggagagctacattcttctctgaagtctccagtagccccrttagactcctacagaccgtcatttcacaggagtcagaaaaactccaaaaacttcccccaacctggcttcctgcttccttcgagcccagcgagaggctttcattggagataccacccttgccccacccaggggaaaatctctgatgccgaatgagtcatgcatttctgcatgggcaagagtccatcagcttggatctgaagagcaggtttctcaagaatgcagataagaaagtaaaatgtgcaaaaatgagtaggagaaatggccttatcagcaggagatgagacaaggatgagggtcttggctgagcctgttgtacagacagttgtgagtggtggaatcccagggcaggcctgtctgtggacagcaacacagcttgggcagcaaccctggacagggcagaactgcaaaggaggctgtaaacatgtatttctatgtcatatatatatataatttatatgaaatatttgagacacatatataaaatataacttaaccctttataatatatatatttatattatttgttatacatattagtattaataatttgaaagttatcatatatatgaatatatattatgtatttctgtagcatataatttctatatttatttatttatttcagtkgatgttagaaaggtacgaatcatttccatggttgtaatccctgctactttggaggctgatgtggcaggatcatttaagcccaggagtttgaggctgcagtgagccacgattgcaccactgcactctagcctgggtgacagagcaaamtcctgtctcagaaataatcatttccatggccactatgtaatctctctaaattttaagatataaatagaataattgaatataattgaataatattaagaatacaaacaactcaaagtaatttaatattatttgtaaagaacagaattgcctatgttaaaaaccctagagtttaataaaacacatatcagcacatagatgacatatgatrttataataaaattatattacatataatttatattatagttatattacttatatacatcattatattattatgttcatatataatataaacatatcattaatatacaattattagattttaatatattatatggttctatcttatatatatcacaattatgctatgcatattatatattatgtacatgtatacatcagtaccatagaggttttattaaactttctggggtttccaacataggtatgttcactacatttaatgttaagtttgtattttatgtgttaaagtatgtatttaactttaatgttaattgcattagtcaggttatgtacaaaaataagttacataatgacaaaaatattcttatttttctggtattaatgaaatagtttcaatttttacttttaagcataatgttgactgacgctttgaatattttaattcttaatattttgagagacttataagatgtgcattaattagatagtagccaggaaaattcttgcatgctttctagtattacctaactatatayatgtatatgtagttaactatatacatgttatatatcatgctgttgatattatctatattttatatatatctaacaatataacttataaaacatttttattatatacataaatacatatatactacatgttatgtagtatatgtgttctaaagattgatatataatataataaatacatttgtttttgtatagtatatgttagtatagtattagtccaatagtataattagttacatttatatattagctatacataaatatattagctatatataaaaatatattagttatacatatatatgaagtctacagtgtttctctgttgggtatatgcaccaaaattaagaccttttctttttgttaaaaataatgcatttcaagatacaatggatcaccagctactattcattatagctccaatgtcaataactaaaatatttagaaataatttttcaagcagtaaatgagtatctcgaagctgactcatgaaagaaaacttgaatacatggaaaggaagagtggattgtatacatgtattagttatttcaaagttaatattgaaggctaaggtagctctgattagagcattaattactgttctctggggagtggtcattatagaggtgatgatgaaatacacactgaataaactgataggaaataaactttccagaaacatctgatgagaaagtctttggtagaaaacatcaagaaacacttctgtgatcataagaaatgctatcaaaaagataactacaaaaattaaaacgcagaaatacaagatttgacttttagatcaatgaagcagaaaataatagccttagagcaggtctgggaaagagaaggacattacattcggtacaataaagtttttaaatcaaggtggcaggggtgaaaggtgttggggaaagtttgtgttatgagttgacttacatccccccaaaaaggtatgttcaagtcataatccaaggtatgtgagaatgggatcttatttggaaatagggtcgttgcaggtggaatcaagttaagatgaggtcattgggggtgggtcctaatccgatatggtgaattaggatgaggctgctacatgccaaggaaggctaaggactgatgccaactgtctgaagtgaggaagaggtaaggaaaggtcctcccctagaaacttcagagagagagagtgactctgccaacacattgattttgaacatctggcccccagaactgtgaaagaataaatgtttgttgttttaagccacctcatttgtactaatttgtttcagcagcccaaggaaattcacagagttagtttaggaaaaaccattaccaattcaattagcatgcttttccatacacattaaggacattgagtgaaacaaaacaaaaattggaagaagctatagttaaacagtaaatttacatctggatgaggtatagtgttagtaatagcaaaaggttatctgataagtagcatgactaaaggccctatgcaaactgaggaaatattagcaacaacatgacattgttttaactgcttgacaaataaagagttcttataaatcaataatggaaacacataattccttccaaaaatatcagcaaaattttaaacatcttttacagattaaaagtacaaatattagagtggacacaggaggaaactcatgatcattcataatgtaccataatcacctatcaaacattagatactgatgaggaattgagaaaatgaactattattaatgccaaaagttgttcattatggcattttaaattatggcaaagtatgaaaattaaccagaatagtgaacaacagtaaaatggttaaataatttatactacttaaaaataaagtatcataaattgtttaggccaggtgtggtggctcacgcctgtaatcccagcactttgggatgccgaggcaggcagatcacctgaggtcgggagttcgagaccagcctgaccaacatggagaaatcctgtctctactaaaaatacaaaattagctgggtgtggtggcgcatgcctgcagctgaggcaggagaaatgcttgaacctgcgaagcggaggttgcagtgagctgagatcgtgccattgcactccagcctgggtaacaaatgcaaaactccatctcaaaataaaatatatatatatacacatacacacacaacacacacacacacacacacacacacacacacacacacacacaatggacacttttccagccattaaattgtacatataattttttaaatttatttttttaattgagacagggtctcactgtgttgacaagggtggtctcaaatacctgagctcaagggatccgccttccttgccctcccaaattgctgggattacaggtgtgagccatgatgcccagtcttgaataattttttaacacgaagattttccgagaaataatattggatgaagaaagcaagttgaaaaccgttcatacaatatcaacccaaatagagagagagagagatgcatctacaagagtatgtgatatggtttggctgtgtccccacccaaatctcatcttgaattgtagctcccataattcccacatgttgtgggggggacctggtgggagataattgaatcatggaggcagtttcccccatagtgttctcatggtagtgaataagtctcatgagatctgatggttttataaggggaaactccttttgcttggctctcattctctcatgtctgccaccgtgtaagatgtgcctttcacctcccatcgtgattgtgtgtcctctccagccacgtagaactgtgattccattaaacctctttttctttataagttaccccgtctcaggtatgtctttattagcatcgtgaaaacagactaatacagtatgtaacaattttttttaaatagtcaaatggcaatggggcaggaaattggtggtctttattttcctccttataattttctttatttttttgtatttcccaagctattttgtatttttataatcagaaaaatattagctttgttgttttttcttgctacttttcactatttactgaaaagtagcaagaagagtaaaaacaactcccgtgtccccttcacccatctttcccaattgttagcaatttatcaaatatatcttctctcgcccctcttcctttctcctgatcatcctctttcttcctctctctctctttctctcttccacctccacatgtttcttatgcttctgaatatttgggaataagatgcagatatgatgttcattaaatttagaaactttagtgtgtattttctaaaacaaagacattctcctacatcatcactgcgaatcatcaaaatcgggaaattaacatgggtggattcttaggatttaattcacaaatcccagccaaacttctccagctgtcctcaaaagaaaatttatacacagcaagcaaaaccaatggacaaacaaaaaccaaccaacaaaacccctacttcctctaccctctttctgttctggtccatggattttcttgttgtatctgtttaaactcctctgatctggacaaagactgagcaatctttattctttcttgaattcaaagaccttgacattttctgagaataaagaccgggtatcatctagaatgtcccttgaattgggttggtttgacatttccttcaatggaagtggaagtgatggtgtgttctcaatccagtagacaagtaagtgaattagccccaacaatggttataaaattcttcatctcttgattaaatggtgtcttccagttttctccactgtaaagttacttattttgtcattacttaataatttgagatttttaactattttatgggagatactttgagatgaagccaatattttggttcttatcaaacatttaatgccaggtttagcatccattgatcattttctcttggatgaattttcagtgcgatttttgctaaaagtattgtggtaaatttttaaaagtattttaaaatataaattctttcttaacttgcccttacttgtgtgccttggctctagaagaaaatttctaaggtatagtactttaggaatgttaatgtaatgttatctgagataaccaacagtagaacacatagaattagacacgtttgagactaataagctttttcataattatgcataatacagactgggtttgggaactctaggaatttagctattttcctataaaaatgattggaaatgtggtttattttgaatacattcttcctcttttaacttgcccattgagtctaattctcccaacctagtcatcctattctctatttaaaatatcaaataagaagggaagggaaaatggttaaagaattacttatctaaatcatctgcaagaatatatcaaataaattatgtgaacccaacagtgggagtgtcttattcttgcctctgtctcctcaaattctgtaacaatgtctgccttctgtgagcagagaggttgcataaaccgtgactgccattctgtgcaacatcagtcagaataccactacagtccttcgtttcatatccagtgggaaaaactgtatttctctgtttaatgttttcattctgcatgaaggaaattatcaaggagaatttgtccttttaaatgataccagtagcaactgatgttcatttgtattgccataatatttttttcttaaagcaggtcatcttttatttcttaaaaattttggactctcagttttttgtttttttgttttttgtttttttgagatgagtctcactctgtcacccaggttggagtgcagtggcacgatctgagctctctgcaacctctgcctcccgggtgtaagcaattctctgcctcagccacctgagtagctgggattacaggcctgtgccaccatgcctggctaatttttgtgtttttagtagagacagggtttcatgatcttggccaggctgatcttgaactcctgaccttgtgatccacccacttcagcctcccaaagtgctgggattacaggcatgagccaccgcgcccggcctgactctcagtttttttctctttcaatggtttgtcaatttaaactgttaatgcacatttcttttcttttgtggcttttgacatagggtcacaccatccttgttttcctttagatagctcatgcccatttgacttaggggtgaaatacctcataatgtcattatttttacttgtctcttrtatattattttaggcaagattcttgatgctatcgatgattttggcctaaggaacaacacccttgtctactttacatcagatcacggagggcatttggaagctaggcgagggcatgcccaacttggtggatggaatggaatatacaaaggtgaggagaggaactcatgcaagtgatctggtggtgaataagcttttttgtggttcttataattaaagcccatgacacaaaggaatgaggcctgaaaaactgaacaagtttgtttaatttgactcttagtaaaatgaagtattggaccaaggtcaagaaaattggtcttacatttgttaacatttctgtggaaggaagccatktatgtagagggakcatctagaaatatgcctttctgacaaccctatcaaattatgaggagttagcacaagcagatgcttttatggggtctttaaagaaatatctactcattcattccatttatgagattattgagagattaaatgagggggagtgtgattcctagagaacagagatcagaaaccagggatccttcatcattaagaagtcttcgacactctcttccaaggatatagtayagcatagaaagtagacaagcctgtcttgggtttcatgattaaattcacatatactgattttatgtcctgctgtaacatttastccacaaaataggtccataagctactacattggccagtctataatgtgtaacctgatgttagaatattatcttcatttgtgaaatgaggrttaaaaaaagaaaaagaaaaaagataattatctggaaaatgtcgagtatattttatcatatgtcttgagagagattttaaagtattttctagaggaaaatacgttgttattcatgcaactacagattccacagtcttggattcggtaggaaattataatttctgtatgaatgaggtaaaggctctgcctccatcttgcagagggtatgaatgtgtactctttagagcgtgtagcactaaagtgtgcacttaggacccaaaacaaatccttagtggaaattgttattatagacattctatttwaaaaaaaaaattcagtagttttggggttacaggtggtttttggttacacagataagttcyttagtggtgatttctgagattttagtgcaccgtcatctgagcatgtactctgttcccaatatgtagtatttttttcctcagcctactcccaatcattccccaaagtcaccagagcccattatatgattcttatgcctttgcattcttgtagcttaactcccacttataagtgaaaacaggctgtttggttttccattcctgagttacttcacttagaataatggcctccagctccatccaagttactgcaaaagatattatttcacttatttttatggctgagtagaattccatggtgtatgtacaccacgttttctttatccacctgttggttgatgggtacttaggcttgttccatatctttgcaattgagaattgcactgctataagcatgcgtgcgcatgttagacattgtatgtttgcttatgggaactgtttttaaaaatttttggctcatgcctgtaatcccagcactttgggaggctgaggcaggcggatcacaaggtcaagagatcgagaccatctggccaacatggtgaaactccatctctactaaaaatacaaaaattagctgggcatagtggcggacacctgtagtcccagctactcaggaggctgaggcaggagaatggcgtgaacccaggaggcggaggttgcagtgagccgcgatagcaccactgcactccagcctggcaacagagcgagactccatctcaaaaaaaaaaaaattaacttttcagcatgccatgacataatgtagattttactctgattaacttaataaaataagagtcaattaacacaggacagtggccacttctcctaatttccccctggaaatcctggtgtatgcctgtcatcttggtataattaagacaactttctgcttttattctcaataataccttgatgtggacaataagttaccatatgtccatagtattccatttgttttcaaggtgcatgaatcaacagtgagcaaaataggcagaaatcctcgtcttcatggagtttatatcctactggagggaggcacagcagaaaataaaataaaataaataaataatatggcatattagaaggtggctgtaaataagaaaaaacacgagagtaaagaattctggggtgggactgccatttcaaataaaatgttcaggcacgcctcattgaggttactgtgagttccataaaattgggggctggatacaagaaaaatattaattaaaaaaaatataggaagttactttgagcaaaggtatgagggaggttggaaatgaagtaggtgtatatttgagataagaacactttaagtagagaaaatagccatgcaaatagaatgtaaatgtccaatattacatatgcttagttatttaatcaaaaacctaccagcagcacaggaaaatataattctgtagacgtgcactacttaccccactaggactctacatagagtagacactatacaaatgtgatctcttttgatactagcttaccttttaaatacattcaatacagtgactattttaactaggcacaataattgaacttaattgcattgtctyataggtggaaaaggcatggggggctgggaaggtggaatccgcgtcccaggaattgtccgatggcctggaaaggtaccagctggacggttgattaaggaacctacaagtttaatggatattttaccaactgtcgcatcagtgtcaggaggaagtctccctcaggacaggtgatgtcatataaactgttaacaagagcttattttcacccttcttccttctcagaagattcagaacaaggagactgactctatcctggcagacccactttttccctagtatctacacagttttaccttcctatatgactgtgtctattcagcatttttcagaagagaccagtcttttctttttttctattgaggtaaaatatacatatataatttaccatctttaccatttttcagtatacagttcagtggtaataaacatacttattttctttttttccccttcattttcctctcatctctcccctctggtcatcactattctactttctatcttcctaagattcactattatttatttttagctcccacactgagtgagaagatgtgatgtttgcctttctctgggcttggcttatttcacttaacataatggccaccagttccattcatgttgctgcaaatgacaggaattccttcttttttagggatgaatagtattcccttgtgcatatataacactttttaaaaagttaatttgtctgccgataggtggttaggttgattctatagcttggctattgtgaagagtgctgcgataaacatggaaatgcagctattcctttgatctgttgatttcttttcttttgggtgtataccaagtagttggatttctggatcacatggtagctctatttttggttttctgaggaacacctcaccacgcaaaacagataaagcaaattacaaccgaaaatagagatggacagatttataaccagaggtcctgaacaagtatcagagaccagtcttagatactaatctaatgcggaccatcttagatactttaacattttcaattgagagaaagatggagacaggaagctttggagatgaagacatggtaggtaaaactcactcatctctataagaaagggaaaaataatcctagtctctggtgtgaaagatctggaagactgagaagaaggtaagatatttgaggatgctttgaactctatcatgaatactttgaatttcttcaagaggagatcgttcatactacattgctccattccctggcagcaaccagcctaggtaggtttgctgctgattgacagttcattgatcacagctctgcaagggaatccagatgggttagaaccgcagctatgtctctcctccaagcccacagagttcttgtaatatttctttcttcacgtaacaaagctaatctatttctgaagaaataggttctgttggcactaatacagaaaagaaaaatattttagaagtcatggttaacttactgaaaaacaaactatcaagaactaatcaagacacatccccaagtttgcctttctaatatttaaaaatttatgtttgatgctagcagatatctctatcaacacactaaggctggaatttattttataattttcgggactgaactttagatgaagacatttttattttctgcctggaaagaagttagtcattgatgatgctaacacaggaaagaaaaaatattttattctttatttttatttattttatttttgagacagagtttcgttctgttgcccaggctggagtgcagtggcacgatctcagctcactgcaacctctgcctcccgggttcaagtaattctcctgcctcagcctctccagtagctgggactacaggcaccggccaccacgcctgggtaatttttgtatgtcttgtagagatgggttttcgccatgttggccaggctggtcttgaactcctgacctcaagtgatcctccctcctcaacctcccaaagtgttgggatttacaggtgtgagccatcatgaccagcccagaaaaaatatttaaaaaaccactgtgaagttattgcaaaaagaacctatcaaaaaactatggagaagcccagctttcctgttctaccatttagaaatagttgttttaagaagtctgtcgttccacatagcccaacagcctgttagggagacggcaaatgtccaggcacaatattgttacgttgcatgagggtggaaggcaactgctgccaagttccagccgttgtcctcacgttaaaaagaagaacgagttgattggagtcactcatcactccagtgcattcggcgccatgagattacatgctcatttggtcaggggtttagggttatgagtttggtgtccttgataagatgtatagtacagctgtcctttcctgcctgcaaccatgactccactagccataggctaagtcttcagaggacgcaccatctttgtagttcaacgggaagtggaagaatatcgcgaagatgactaaggcactgtggtgggagacctaacctcagcttcacgtacaggtcggcgtgccgggtactactcatcaggttgattttttggttattcctatgcttggttctcccaagcctctttatttgaattcatgacttctttggcatgtgcattgaccagttaaatatgtccttgctaatagagaatagctgtactacgtagaagggaacaaacagcaaattcacagtatcaggctcactgtctatgacaccagcatcatgagggcctgtggatacctctctcctgtctgcttcaatccccaacacaatgaaatcaacaagaagaactcaaaagcggctctcacctgtacagaaatgaaggctgctaatactgtaaaagccaaatagttatttatttttagaattaacacaatttgtttcaccacctcatcacacaaaacagataaagcaaattacaaccaaaaatagagatggacagatttataaccagagatcctgaacaagagtgtagaatagacaaaaaagaaaagtaaagataaaacagaggacaccattaatgtgtagaaacacgggaatctgaggatgcaatggtttatcaaagtgttgggaaaaaatgacttatcaggtatgtggtttaccaatacagctgtcccttggtatccatggggggttggtctcaagacctcacgtggataccaaaatacccagatgctcccgtccctgatgtaaaatactgtagtatttgcatattacctacacacatccttttgtatatattaaatcatctctagattactcataatacctaatacaatgtatgtaaatgccacataaaatagttgttatattgtaccctttagggaataatgacgagaaaaagtctgtacatattcagtacaracaagaccgtccctaaaaggaccataagcctaaatgtaaacccaaaattataacacttctaaataaaacataggagaaaatcattgtaatattcagataagaaaataatttttttagatttatcaaaaaagttgcaagctataaaagaaaaaagtgatagattagtcattatcaaaatttaaaatttctgcttttcaaatgtcaatatcaagtaaataaacatgtgacctcagtccattagtggagaaaaaaagaaaagaaagaaaaaattaaaatattaaatatgaacttaaaagaaagtttaaaagaaaagaaaaagacaagccgtggagtagaagcaaatagtcatccctctgaactcagaggttctgcatctgcgaattcaatcaactgcagatcaaaagtatttcataagattttctagaataaagaatctagaatagcctaaaattttttgaagaagaaaatcatttgaagactcactacataattccaaaatttactataaagctagagtaatcaagtttaaaagagtaatcaggatggtgttctaatgctctaaactttttaaaattgatatttaatattttaatttttttctttttttctttttccccactaatggagtgaggtcacatgtttattttcttgacattgccatttgaaaagcagaagttttacattttgataatggctaatttatctttttttcttttataacttgtgatttttgtgataaaacttaaaaaaaattttcttatcaaaagatcacagtgattttctcctatgttttcacttagaagttttatagttttgggtttacatttaggcttatggtccacattgagttaattttttaatgtggcttgaggtataggctgagatttattttccttgcatttggatatccaatttgtctactgtcatttattgaaagacagtcctatctctactgaattattttgagcatttgttgaaaagcagtatacgtgttggtcaattcctggactctcctatttcattgatccattgaaacccttatttcaacactacactgtctcaattagtctagctttatagtaaatctgggagttatgtagtgagtcttcaaactattttcttcttcaaaaaattttaaaccattctaggatctttattttcccatgtaaattttggaataagtttcttcctttcaacataaacctttctgaaattgtgattgagattgctttaaatctatagatcaatttgcagaaaattgatgtcttaaaaaactttgaattttccaatcaataaatatagttcatttctccatttatttctcttatttggtgctttgtggcttttctcatacaaatttttcacataaaaatgctatccctaaatacttcatgctttctcatgttatagtacatgatactttaaaaagctattcccagctattcattgcaaatatatagacatttttaaaagttgttattgtattgtgtgatcttgctagtcttactcattatttccggcagttttttcagwgataattaacataggaaatcattgtatctgatagtaaatatagttttatttcttttaagatcctttttaggcatggcacggtggctcacacctgtattcccagcactttgggaggccaaggcagataggtcacctgaggtcaggagtttgagaccagcctgaccaacatggtgaaaccccgtctctactgaaaatacaaaattagccaggcatggtggcacacgcctgtaatcgcagctactcaggaggctgaggcaggagaattgcttgaacctgggagatggaggttgcattgagccgagatcgtgccgttgcactccagcctgggcaacaagagcaaaactctgtctccaagaaagaaaaaaaaatcctggctgggcgcggtggctcacgcttataatcccagcactttgagaggccgaggtgggtggatcccctgaggttgggagttcaagaccagcctgactgacatggagaaaccccatctctactaaaaatacaaaatyagctgggtgtggcggcacatgcttgtaatcccagctactyggaaggctgagacaggagaatcccttgaacccgggaagcagaggttgcggtgagcagagatcacaccactgcccctcagcctgggaaacaagagtgaaactccatctcaaaaaaaataaaagagaaaaatccttatctgggatgtattattatgtgtcccattacaaagcaggttttattattattgctttctaatacaaggcataagatatattttctaatataaatttttaaaattcattttagtttagattcagggtcccatgtgcaggtttgttatttggatatattgtgtgatgctgaggtttctattaaattcatcacccaagcagtgaacatagcgcccaacgggtagtttttcaacccttccctcctccctccctcctgcttttcggagccccccagtgtctaatgttcccatcttcatgttcatgtgtacccagtgtttagctcccatttgtaagtgagaacatggtgattggttttctgtttgtgcgttcatttactccatttctcatataaaattagaagtatatgactttttagtgattacataaaattttttcaaagggtagcaatataattgcaaatgaagttcagatttatgaaattgccataaattgctgagctgtggagagctctgtgtcgcagccaaggctgtctgatcttttcgcctttggggcatgcattgtcacattcctcggcctcatcatttcaggatcagaacttagctttcttctcttgtccactggagtgtaatctcccagagagcatgcatgagttttcctaaagactcagtacgctgtcctctggacctgaggcatgacgcagtcttcaccaagtacccttcaggtagcttgggacccaacgtcccttctcctcattttccttatctgcactgtctgtgtctctgcagggtcattgacggccgagacctcatgcccttgctgcagggcaacgtcaggcactcggagcatgaatttcttttccactactgtggctcctacctgcacgccgtgcggtggatccccaaggacgacagtgagtgctcaacccgttgcttcctgttccctgccaggagcagggtcactcaggtgtatcctgaacgcattcttcctttcctctctagaccggtcctttcattccagggctcactgaacacatggttttggagaagtttctcagaattgctcttctgcagaaaggcaggtgggggtaatggagatgctaattggcttcacttaattatctcagcagtcgcacatacattaaaacatcacattgtgcatggaaaatctatgcaatttttacttatcgattacactttaataaagaaaacagatgtatgaacataagatttgcctataaagttagagagacacttttacgaaacatacatttttagtcaggtgtggtggatcacgcctgtaatcccagaactttgggaggccgaggcgggcagatcacttgaggtcaggaatttgagaccagcctggcaaacatggcaaagccctgtctctactaagaaatacaaaaattagccaggcatggtggtgcacacctgtagtcccagctacttgggaggctgaggcggtagaatcacttgaacccaggaggcagaggttgcagtgagctgagatcacaccattgcactccagcctggaagacagagtgagactccatctcaaacaaaaacaaaaccaaaaaatatatatacatttttagaaacaggactgatatctgctggaaaatgtgtatatcatttcaccagggaactctaatgttctcgttttgttgtaaggattgcataatatttagcattgacgtgtgggcaaaaagaagcccaagaaccagccttgagaagacggaagaagacaagagaagccagcaccttgggtgcatgcctctgatgtgctttctttctttcttttttttttttttggagataaaaaaatatgtattgaatatcttctatgggcaggttattttgtaggcataagtggtcatggctaaactttcatttataaaaatcaattctaggcagactaaagataaaatgtaagattaaaagtgttagaagaaaatgagtttatgacccagaaattggaagttttttaaatttttaaaaagtggcacacatataataatatgcacacattgcacatgaaaattggggatatctagtgatattttgagataggcaatgcatagtgatcagattagaataaytggcacatccatcatctcaaacatgcataatttctttgtgttgggaacattgaatatcctccttctagctatttgtaactatgtaacatattattgttaactatagttattctacagtgtttagaacaggagtccccaacttttttggcaccagggaccagttttgtaaaagataatttttctgcagactggggtgggggatggttttgggatgattcaaatgcatgacatttattgtgcactttatttctatcattattatattgtattacataatgaaataattctacaactcatcatcatgtagaatcagtgggagccctgagcttgctttcctgcaactagatggtcccatctgggggtgatgggagacagtgacagatcatcaggcattagattctcatacgtagcctgcaacccagatccctcgcatgcacagttcacaataggtctcgtgctcttatgagaatctgatgcagccactgatatctgacaggaggaagagctcaggcaataatgccaacgatagggaatggctgtaaatacagagataaagcttcgctctctcccccaaccactcacctcctgtgtgtgaccaggttcttaacaggccacgaacaggtaccagtttgtggcctggggactggggacccctgctatagaacactaggacttcttcctttgatctggctgaagtgcgcatcatttgacgagtctctcttttctcctccaggtgggtcagtttggaaggctcactatgtgaccccggtattccagccaccagcttctggtggctgctatgtcacctcattatgcagatgtttcggagaacaggttacctaccacaacccccctctgctcttcgatctctccagggacccctcagagtccacacccctgacacctgccacagagcccctcyatgattttgtgattaaaaaggtggccaacgccctgaaggaacaccaggaaaccatcgtgcctgtgacctaccaactctcagaactgaatcagggcaggacgtggctgaagccttgctgtggggtgttcccattttgtctgtgtgacaaggaagaggaagtctctcagcctcggggtcctaacgagaagagataattacaatcaggctaccagaggaagcctttggtcctaacgagaagagataattacaatcaggctaccaaaggaagcactaactttggtgctttcaagttggcaaggagtgcatttaatagtcaataaattcatctaccattccagattattaaaggcccactggttgttccacttgctgcttttttttggattcctgtggataaatgttgattgaaatttgttttatttcccgaaagcttataatttactaattctcttataaaaaatccgcacgatggccgctgataatgtcactgcagaattgctacttcttctgtttgtcacccagtctccaccttgcctatcgccagcaccaacactggcctttgcagtcttcctgactttctttgttttgttctttcattccatttgctgtttccttgaggtctttctcttctcacatgggctgtgtcttgcaagtctatgtttgggttcatttttctttgcataatctgaagatttgtaaatcgtgccaaaaccagttgtcttgccaccaccaaaatgaattctgaatatgaatacaaagaggacatcctggctgggcacgggggctcactcctataatcccagcactttgggaggttggggtggggggatcacttgaggccaggagtttgagaccagcctggccaacatcatgaaaccccgtctctactaaaaatacaaaaattagccaggcgtggtgacacatgcctgtaatcccagctacttgggaggctgaggcrggagaattgcttgaacctgggaggcagatgttgtagtgagccaagattgcgccactgcactccagcctgggcaacagagcaagtctccgtttcaaaaacaaccaaaaaaccaggacatcctgtgtggtcttgtccatttcggctagtttttcctgaatatctgtcttaggtgctgttgccttcctggggtgaaggacatcgatgaccatttgttgcctctgaagaagtcagtagctcatgaccttcctgtgtagatagttactatgtcatccatgttgacagctgagggcactggcaccatcataactcattgaagactccacagcaatcctcccagttcagcctctggagtaggtggcactgcagacacataccaccacacccggctctttttattcttttgtagagaatgggtcttgctatgttgcccaggcccatctcaaactcctgtccccaagtgatcctcctgcctcagcctcccaaagtgctggaattataggcatgagccactgcatcaagcctaatttccattttctaaacgtgtctttccgtgccagaaaacaagcacctacagacacttgtgccatctgctcagttgctttgctctaaatataaggccctgtgtcatcaggaggcaacatacgaggcatttaaacagtgcattaagaggatcaagtctaaacgtggccactaaccaaccaaaagggtttatgtttgtcaacaacagatagaaattgaatcaagagtggtgcaataattcagcaaaacgtgtgtgaacccagaaagtctgagacaggtctcagataacttagaaagtttattttgccaaggttgaggacgcgcctgtgacacagcctccggaagtcctgacaacatgtgcccaaggtggttggggcacagcttcattttgtacactttagggagacatgagacatcaatcaacatatgtaagaagtacattggttcgctttggaaaggcgggaccacttgaagtaagggctggaagacttgaagtgggagggggctttcaggtcacagacggtgagacacaaacagttgcattttttgactttctgcttagcctttccagaagaggcgatcagatatacatctatctcagtgagcagaagggtgactttgaatagaatgggaggcaggtttgccctgagcagtttccagcttgagttttcctgagtcattttgggggcccaggatatttttttttcacacatgctagcactgagtgacatagcaattggtctcctggcagcctggaaatttcagcaacagctgataagacagcgtggtgagcagccaggttctagaaagcaaagagaagtaggcatcaacaacctgggaggagcactgctttgatccccccagaatgtgccagaccattaatgaagtatcttatttccttcttaattcagcctcatgatttaggtataaacacttgtgtgagattgcccagagctgccataaaaatcaccataaacttggtggtttaagaaaacagacattcattcttccacaattctggaggctagaagttcaaaaatcaaggtgcttcctccgaggccctgggtagaatccgtccttgccaatccttgaaattccttggcttgtggacatatcactccaatctctgcctttgtcattacatgaatgtctacgctctgtgtctttaaatctctctctccttatagagagagattatagtcatatagaatttagaacccaccttcatctactatgacctcattttctcttgatggcatctttaaagaccctatttccaaataaagtctcatgtgcaggtaccaggatttaggactttaatgtaaccttcgaggaggtcataatttaaccctttgcacccttatataccaagaagagtacctgggacttggaaatgctctgtaatttgctcaggagaacacagcttaggtgttactgggctgagactggcaccctagccatgccaatcccaaatctccatgtacatcaaccctatggtgttgaagtaggaggcgcgacttgactccagaggtgggggttggacaccagaccagattgagggctagctaaaacagggcagaccaaagcagctttcagtcagacacgcccatcagtgtgccatgtcaatttaccattgccatggcaacacccaggagttaccacctctttccatggcaatgacccaataactcaacgattactacgctttccctagaaatttctgcataacccgcaccttaatctgcatgcaattaaaaatgggtatatattttgggaggccgaggcgggcagatcatttgaggtcaggagtttgagaccagcctgaccaatatggtgaaaccctgtctttactaaaaatacaaaaaaaaattagctgggtgtggtggagcatgcttgtagtctcagctactcaggaggctgaggcaggagaattgcttgaacccgggaggcagaggttgcagtgagccaagatcgtgccactgtgctccagcctgggagacagagtgaggcacggtctccaacaaggaaaaaaatacaaataaaaataaatgggtataaatatgacttcaaaaaaaatatgccctgagctgctactctctgcctgcagggtagccctgttctgcaagagcagtcacggagctataacactgtcacttcaataaagcagttttcttctacctctggtttgcccctaaattctttcccgagctaagccaagaacacttgtgggctaagccccactttgagactcacttgtcctccaggagtgtctctcaaaggtgcaaccccaggagtaacataatcatgtgtgttcgtcaatttgcaattgcaaaaatgtggaacaagcccaaatgcccatcaatcaatgagtggatacagaaattatggtatatatatgtacaatggaatattactcagccatgaaaatgaatgaattaatggcatttgcagcaacctggatgggtttggagagtaagcgaagtcagtcagaaacagaaaaccaaacatcgtatgttctcactcataagtgggagctaagctatgaggatgcaaaggcctaagagtgacacagtggactctggggactctggaggaaagggtgggaagggggtgagggataaaagactacaaattgagtgcagtgtatactgctcagtgatgggtgcaccaaaatctcacatatcaccactgaagaacttactcatgtaaccaaacaccacccgttcccccaaaacctatggaactaaaaaaaaaattagaaaattatgtgtgtttgacttatttcaatggactgatactgttgccttgtctttactaaggagtaatatgaatgtgtcaggtgaaatacaaataactgtcttaatattaactattaaacaaggatatctttttcctaagtgatttggggcaaccatattagaccttatttgtccacaaaagaattccttacaaaggctgagcatttttctgccactctttgttctaagatctctaaaacatcttcgttttctcatcactcttaggaggaggttcgttttgaatttagaataccctagaacagaatcttaggattttagcctgagaaataacttctgaaatcgttttctcaaatgctcttatatttgcagatgaagaacacagagtgtgaagacacgaagcggctttaatgagtctgcactgtaaagggagcaggaccatgaggtctgaacccaaggttgtcaaccccaaatgcaaggtccttctccctccctggctccggtccttccattttctttaaccacatggcaaggagaaggtagtagataaaagcaagctatgtacaaccaagggaacacgttcttttccacacagtggtgttcagaggggaaagannnnnnnnnnnnnnnnnnnntccaacaaggaaaaaaatacaaataaaaataaatgggtataaatacgacttcaaaaaaaatatgccctgagctgctactctctgcctgcagggtagccctgttctgcaagagcagtcacggagctataacactgtcacttcaataaagcagttttcttctacctctggtttgcccctaaattctttcccgagctaagccaagaacacttgtgggctaagccccactttgagactcacttgtcctccaggagtgtctctcaaaggtgcaaccccaggagtaacataatcatgtgtgtttgtcaatttgcaattgcaaaaatgtggaacaagcccaaatgcccatcaatcaatgagtggatacagaaattatggtatatatatgtacaatggaatattactcagccatgaaaatgaatgaattaatggcatttgcagcaacctggatgggtttggagagtaagcgaagtcactcagaaacagaaaaccatgtaaccaaacaccacccgttcccccaaaacctatggaactaaaaaaaaattagaaaattatgtgtgtttgacttatctcaatggaccgatactgttgccttgtctttactaaggagtaatatgaatgtgtcaagtgaaatacaaataactgtcttaatattaactattaaacaaggatatctttttcctaagtgatttggggcaaccatattagaccttatttgtccacaaaagaattccttacaaaggctgagcatttttctgccactctttgttctaagatctctaaaacatcttcgttttctcatcactcttaggaggaggttcgttttgaatttagaataccctagaacagaatcttaggattttagcctgagaaataacttctgaagtcgttttctcaaatgctcttatatttgcagatgaagaacacagagtgtgaagacacgaagcggctttgatgagtctgcactgtaaagggagcaggaccatgaggtctgaacccaaggttgtcaaccccaaatgcaaggtccttctccctccctggctccggtccttccattttctttaaccacatggcaaggagaaggtagtagataaaagcaagctatgtacaaccaagggaacacgttcttttccacacagtggtgttcagaggtggaaagaatgttctctagggtttgacacaattggggtgaatgggaattgttcttcttgccagctaaatatctttggacatattccctaatctatctgtacttcaattgttccctctgtgaaatgcaactaaaaagtgtattaccagacttacaaagattaatggagataatatctgtaaaagactttgcacatagcgcataggcccataggtagctcttaataagtattatatttccttttctagtggttattttgaaaataccttaagattaaaattgaaagaatgtcatctatcaaaatgatacaaacctttgccattggtctaaacactccaaactcaatgcttaat

SEQ ID NO: 95335 - DNA, 31570 bp, Homo sapiens
actttgaactaaaaacattagctgtttgttgagtccaagtaggtagccacttgaattgaaagtaaatacatggccttgctgactgacacaaagccgttctccttatggcctacacccccaaaagtgccacaaggtagtcctagatgaatgcctacacatgcagaccccaagtttggtagtgggggtggagtgcttaaaacttacagtgagcaataggtaaacctgctcatttcaaggtagcttactgccaacagaacactgaggtacagcccaagaagaatggtcacggccttaaattcatatgaaggaagaaaatacatgcaggaacactcagcgttcctggcagattgcctctcccaacagtgtctccagtgggtcaccttcgacagttttatcaacctactctagaacttctgatccctctctctctacagctttaaggaaaaaaagctccccatctttggggaagggaggaatgccccttttacagctccgttcaatataggcatccaaatcactatcctccttggccccatggggacagggaaatctgcacatagaggtggtcaaaaatgccaaataccatggggcagatctacaatagcatgcaggagagcagcgaaaaaaaaggagccctgagccctgggggtgcttgtcagagccaacaggtatttgaaggaagaggcaacactgttctggggcaaggagtcaaagtgggattacttcctagtaacaactgtctcctgcaggctagcctcttccacctcctccttccaccacctctcacacttctggctgtggaaataacatcatttcttggctgtgatctccaacatacctatcttaaactgcttggtgtgggtgcccataggggagaaaaagtacctgaattcaactggtagggtctgttagcttacaagtaggataaaattcacagatgtgaaagttgtggtaatgaaaattggatcctgaccaacatggttttctagaagagaaaggacaaaggcctttcacgggctggtttaggggataattgcatgggaaaggaaaattaaaatgacctgtggatggagcctctaaacatttaatgtactgctgttttatggctttagcatcaaagtgtgttgttaataccaatatacatttaattgaactaggaaagtttataagtctcccattcagggactactgcagtatagagagatgtagtctaaaagaaacaacatacaaccgcaagaggaaaagaaataaaagcacaggtttagttgaaaacttagttactcctgtagtactcaggccattttccattataaccagctatgtggactttgcagtcaccaaggtgaaatatcctgagtactccaagagtgacctttaaaaagataggcacctcttaggctgctactgagctcttgaggaaacaacagcggccagaggagcttcctgaaagcgtaactgattcatttatgcatactgcaggcagttatcactatcctgagagtcatcctattggaaatgttgataaggaatttgttcttgactttagctgcagtcatcagtgacaccacctcagctctggatggcacttaagtcagcctcaattcattggccagggtggttatgggtgatagaattgctcttcctctttgtgggccaaattggagtcagtgcaatcactaatacatcccactgtgactggattaatgtctcagaccgagtacagggtcaatacagaaacttgagaatgccacttggctttctaaggtagatcctgatggtttatgattgttggtttttttttcctaccttgttggatacaggcccttggatatggctgaagtcagtactgattggtcttatcctgttacatagagttctgttgatagtacctttaattaaatgtaataaaatactttgaatggacctggttccagtttctgtcagtttaattagagtgacaggtggagtggcatacttatgggagaattcatcaaaagccaagakggcatagaaatgaaaggtgcatatcgttgggagacaattcttcatgggtctctagcatttctgcatattttgcaaagagaggcactgactatctttgttccagactatttgtccaggaatgtttgtatagtaaacaaccttagaaggtatcagagcaaagggcgcacatgctcactgcccattattgaagattcaggttccctaacctcaaagttcctctcctttaaggcacttcattacatgtgcaggtatcatctggctctctgcgtcatcatatgggaattggggctcagaactggaacaaatgctggtactctggctactgctattgctgtaagtaacaaactatcctttttacaggtagtaacaggctatcttgttagcttgcaggtaagataaaaatctcagacccttcacaattcttgacagccccactcctacttctgcctgtcccatatcttggaagctccctaacttctgtaacaggaagttcccccgatattcctgtgccatcttacttgatcgcattacttaatacccttctgcatccctcttccttcaaacttttatataattctgctctgctaatacctgtgccaggcctgatcccctcgctttagttgctcacagtctgctgagagtgtcagacacttagacaatctgaacacagtagaaggaggtgcaaagtgctatgggggcttgaaaaggagtatttgttctagtatggaggtctgggaggtcctcatacaggaagtgaaaactgaaccatgagtgaggagttgggccattttacagatgaggaacctgaggcacagaagttaaataagttgccgagatcactcagctaggaagtgggaagagaggattggagccaggattctctacctctaaatatagaaattgctctttaacttcactttctcaggcataagatgagaccatctgagtttacctcaaagaattgagaaagatttggtattagctttgggtctataaaatttgagatccacagagttggtgattgtgaacttggagaagtctgataaagaaccccaggacatgacccggtttttataaaggaaatatttcagacaaataaggcttaaagaataataagatgaatatttgtgaacctactgccattaaaaatatatatattaccaatacagttgaagtcctcagggtatccttaatcatatcttacttcctgcactttcagaagttactactacctggaatgtggtgtttattattcgtaagcattttcttcatacatatgtgtccattatatatatggatatatacagatatatagagacatatatggttattttttaattttatttttacctccttgggagctcttatacaatatatatggttattgttttacctgtttttaaactttatatgtggtttttgattgagagtctcccaaacaacccctgtgttcaggtatttgctagaaggacccacgcgactcagcatatatgactaagatttattcttcgataaaataaggacacatctggatcataagggaaaaggacactggcagagtctggaggaatccatttgcaggcttccttatgctcttcctcccatgagggattgcaaagagcccactttgccccaacaacaaaaatgcagcaacacgtgtgtaatgtttctgtccagggagcccattagagagtacccacagtttattgaggtttggtcatgtgggcaccatctgcctagcacataataaagactcctagaaagcaagcaggtatccaccataaatcatactgcaatcaaacagtctacatagtcaactacccttttcagttaactggtgactgggaacactttgagagccaagtttccagacacctgtcaaaaaacaccaaccttgcaagcaggccttcctaaggataacctgttaggcctgctatggtaaatctgcacaagtaccattctctctgtattgtgcaacttgcttttttgttcaatattttgtttgtgaagataatttagattgatacctgtagctacaatttattctatttcactgctgtatactgttaaacatgacagtttatttaccctattaatggacatttaggtcttttataatttttcactattaaacatttgctgctatgagcattcttgtatggacacatctaatacaggtagtgggattccttggtgggagaggatatacatttttacttttctaggtattgctaaattttcctctaaagcgactgtaccaatttacattccttctattaatgaaggaaatacaagattggaataattgggatagttgtgttatctttgtgaatagattttaaaatactgatttagatttttaaatagttgtaagacttcacattttccatatcttagtttggtaactttttctaaaactgtattaactttatctagattttcaaacttaaggaataaagtttgtttaatatttattactcatctctgttgtatccctgcatatagtctccttttcattaatatcatttataacttttaaaaatgagtcttgccagagggtttgtccggtttattagatatgtcaagactaatatttgcttttgtcagtcccctctattgtactttgcttcttgtttcatttattctgttcttattttcatcatttccttttctacctttttgggatttattctgttcttccttttctacattcttaagttagatccttaactcattactgttttgttgttcttatctcctggtatagggtctttatttgagttctcccagaggcaagttctgagaccaggacctgagggcaatagtatatgtgagagatgcagggagtgccataatgaggtgggaaagtaggaagggaagaaaaggtgagcaataagggtgtagcttttagtagctattgataattgctgtctagattcattaaattcattttgtcattaaaggacaaaatgatgaaattctatcattcatttggcattggtcagttaattattttatgaaggagaacttttccccatcaactatttagttacccagaaatagggtttgtacaggaaaggcagaataaaaagctgctttccttagcaaactctgaggtgaccaaagtgacatttttctccatatgtcgatatgaactttctttgcagtccttgttctttttgatgttctaatttttccatatttggccagtggaatcaccttcaaattgattcttaccttcttttgacatgacctgaaatagtcttttatggctttcttgctttctgttaagatgttctaggctaatcttataaattttcttccctgcacctaaaatcagccatttttttcatggaaccctggttcctttggggacaaaatagtattttaagacccattattgccaggcgcggtggctcacgcctgtaatcccagcactttggtaggccgaggcgggcggatcacgaggtcaggagatcgagatcatcctggctaacatggtgaaaccccgtctctataaaaaatacaaaaaattagccgggcgtggtggtgggcgcctgtagtcccagctactcgggaggctgaggcaggagaatggcgtgaacccgggaggcggagcttgcagtgagccaagatgacgccactgcactccagcctgggcggcagagacacactccatctcaaaaaataaaaataaaaataaaaaagacccattatttgggcttattacgatgagttggtctctggttctaggccttttttttttttttttttttttttagaaaaatacagcaggttgtattgaggttggcacctatgttctttcaaagaaccctcatcattttgtgagttctttccttgtggcaccacgatgttccaggctcatcttgtatgttccctgcctcagcacaggattttttttaatgagaaaaatatcacgaattcaaatttacagaagctttacatttttatgtcctctaagttagcagtctgtctttccttttattggygtttgtaaaatttcttctttttaaaattgttatattttagagacagggtctcgctctgtcacccaggctggagtgcagtggtgcaatcacagctcaccacagcctccaactcctgggctcaaggcatcctcccacgtaggccttccaaagcgctgagattgtaggcataagccaccaggcccagcctattacctttacgttgtacttagtcccagataaaaaatgaccttagatcagtcctttcctctttggctggggagaggggggcttaaattccggtactgtgaaacagaagaatggactcagtgctatgtgacaaatctatgtatgtaaatgtgtgtatatacacacacataaattatatatatgaatatattttcattttcatattttgcaaggagagtagccaatgctctggacctctggtcctttttgtagggtaccctctgaggccgggaacctttgctcaactctcaggctgtccagggaagctttaggcggtgataccgagctacagaccaatataagagctcggggctgtggcactgaagagaggaggcggccgttgggaactgaggtgggcccagggcttgagctgagttggcgagggtggaggtggtgccggtcccacgccgtggtggggaccgagctgcgggctggagggaggggcagcgccgagggggcgggacggggagggctcgcggagtaggccaacggttggccccaaccgccactgactacagcctgcgcccgcctcttttcgttgccgttacctgtttccggcagtcgacacgctcttcgcttctcggggcttgtctccgtgtcctccgtctcagttgtttctccctctctatcctcctctgtctcagtctccccagccttggggccggtgcctcttccgggcttcggcgaatgagacctgcggacctgcccccgcgccccatggaagaatccccggcgtccagctctgccccgacagagacggaggagccggggtccagtgcaggtgagcggggttgggagacaggagagctccccgaggaggactcaactgtggggacaggttgagcaagaccatctgcgtttgggaaatccagccttggattattgagacagagccacctagtcggctaggatctgacctggccagagaattcttggctagtcctatttttattcgttctcacagaagccgaacttaaacctcagaattatcactccagagatgaaagggaactgagactggaaaagccctgcttaccaaaggtctctgggcggcagaaagagccctgagcttcagtttcaacttaggagacctgggtcttggtccagattttactgtggagtggcgttcagtaagctttgtccccatcccgggcccgagttttcccatmtataccatgagagggtttagactacagatcttcaaaggtctggcacgtggtaggtgctccttaaatattacttgttaggagtgaataaatgagataggaaggcctcctgggattcactggaggctcattgggttagttggaggctgtggaattacattattatagtctgagaagtaggcggtattatctccattttataagtgaggaaactgaagctcagaagtaaagtgacttgctagtaagtgtcaaagataagtcagacttcagagtccatgctaggctatactctctcccagtaagaaagcgggraggacttgatgggaaagtgattatatcgagcagcaagtaatcatttgaattctctgcttaaatgaaccccagagcaggcccatatctgattattttctatcccgtttccagcacctgatttgtgtgaaacgttttgggtggcaatgccagaatcaccatctatattacttctgtcatcaacacgatcagcataattacaaaaattaatggctctaattgttatagtgataataaagcataaatgaaattgtgaggacatcaaaatttataattaaagacacctattaaaacagcagtttaaaatttataaaacacttttgagtggttcttcatattgatctgcttaggtaggtattattatccatagtttacaagcaaggaatccaagacctagaggttgagtaaccatcaaaacgtcatgcagcaagaaatggagctgagacttgaatccagcccatgtgacaagttgtgcttctcctttggtgattatttccctatttcctctccatttccttttttttttgagatggagtcttgctgtgtcacccaagctggagtgcagtggtgcagtctcggctcactgcaacctccgtctcckggtttcaagtgattctcctgcctcagcctcccgaatagctgggattacaggtggatgccaccatgcctggccaattttttttgtatttttagtagagatggggtgtcaccatgttggccagggtggtctcgaactcctgacctcaagtgatctgcccacctcagcctcccagagtggtgggaatataggcatgagccaccgcacccagcctcttcctttcctgttctgagccctaacccgctccatgcctatcctgtgctccattcttcttatcacctggagaattcctgtttagatttaactaatagtcacatgttgactgatgatagtagtgttggtttaacttgtaattaaggtgttaagagtttaaagtatgttctctttcagcaataaagggggatttaaatgtttttaagaaagggagttgtaattgttattattgtcattgttatccacaggattcaaggaataaaactagaatatacagtaattggtagtttaaaaataataactgtcatatattgcactcatactatgtcataggccttgtaatagccactgtagttaagcattttatttctatcacctactctgctgaattgtataggggaggatcctgaagcayagagaagttgaataacatgcccaaggtcacatagtcctggcctggtccaaatcctatgttcttaaccattacaccagcctggctcagagacagattgtttgcttagaacaaagcctgaccctcccggggaggagagcctgaattgaggggagagaagtatgctctagtattgagtgagaagatggtctccccttgcttatcttttgattctgctgttgagagcctgggattgaaatgaagggaggcttttcttctggactcagcaaggccactctcccagttcccctcatgatactgagcaatagttcttttcccttcttcaagttaggaacaagtgactaaatattcatatgctattgataaaagtttgtcttggttgacactaggaggctgtagccaaaagcagtgcaactttgccgtatggttcactgtcctgaaagcttcctggaagattggtctaaaatcatcatgccattcctctgtcaaaaattcttgagtggtctcccatctgtggaataaacaccttaataagttatctaagcctcccaggatctggactgtgctgaccccttcagtcccacctctgcccccatcccttgcactccaccttactgtagtcacactaaactactgagaggccccaaaactcactgttttctgttgcctataggcttttcacatccttgtcctctgcgcttctccttttaaccctcagttggctaatccactgttcattctttaagatctggctcactgattcattcaatcattcaacaaaaatttgttgagtgcctattacttaataggcatagttctaggtgtcaaggcggagcaataagaaaacagacatacccttgctgtttctggagcttccattttgtggtatgtattaaacaaatgtaacataggaggcatcaaagtgtgataagtggtgtggagaatagaacaaggaaagaagataggctggggcaaaggagttgacagagaaaccttcctgattggatgatgtttgagcagagctgaagaaggtgagggagcrttatgtggctatctgaaacgagtgttccaggcagagcctgtgactatatgaggcaggagttcttttggctcaatcattctctccaaaaatccttctctggtgccttgatctggatagatgccacttttgtgtttttctacttgctgttgtgtttacctctaaagtagcacttattacatcatgttataattgtccatgtatatgtctgtttccctcacttggattgggtttcttgagagcaggaacctctgatccttctctgtcttctcagcatctattttagggcctgacacagaggaggaacctagaaatatttattgaatcaattgttcttacagcctgataatatttacaaatgatttgtaaaattgggtttggatgacagttggtttgaggaaaaagtaattctaaggctgctttttgtctgtctggcttgattccccttttggacctctgagaagtggaacacctggttttctttaagaagaatacttggagactccattgtgagcattatggcagggtagccaacctgtaaaatggtgggtaaaatataacaaagccggccgggcacggtggctcatgcctgtaataccagcactttgggaggccaaggtgggtggatcacctgaggtcaggagttggagaccagcctggccaacatggtgaaacccgtctctgctaaaaatacaaaaaattagctgggcgtgctggcgggcgcttgcaatcccagctacttgggaggctgaagcaggggagttgcttgaacccaggaggtggaggttgcagtgagccgagctcacaccattgcactcaagcctgggcaacaagagcaaaactccgtctcaaaagaaaaaaaataacaaagccctttatagctgaatttgcaagaaagtaagagaaatctccagggacctagaaaccaagagtgaactgaaaaccagagtggttagctccttaatctgccctcagctgcactggatgtctcacctagaaacttggactttaataggcctgttgttataccaaatgaagctataggtccgcatgggttagactctagtgggttttttgttgtcgttgttggtgtttttttgtttttgtttttgagatggagtcttgctccgtctcccaggctggagtgcagtggggcaatctcagctcactgcaagctctgcctcctgggttcacaccattctcctgcctcagcctcctgagtagctgggaccacaggtgcctgccagcacacccggctaatttttttgtatttttagtagagatggggtttcaccatgttagccaggatggtctcgatctcctgacctcgtgatccgcccaccttggcctcccaaagtgctgggattacaggtgtgagccaccacgcccggcctggttagactctagtttttgacagaggatggcatgtgaaatactcacatgaagctaggtcccttgaaaatctgcaccctgtgtagggtgtataccttctgatagggtggactagtatcttaattcactttctgttgcttataacagaatacgtgaaactgggtaacttataaagaaaagaaatttcttgcagttatggagtccgagaaatccaaggtccagaggccacatctggtgagggctttcttgctggtggggactctgcagagtctggaggtggcatagggcatcacatggcaagggggctgattatgctagctcagatctctagttttcctcttataaagcccctaatgcactcccatgataacccattcatccattcatccattcatgaggacagagcccttataaccctatcatctcttagaggccccacctctcaacactgccatatcagggattaagtttcaacatgagttttagaggggacaaatatcaaaccagatctactaggaaaaaaaaaaattctccctactgacacagatagaagacaaagagattgccttttatcctaggctttcgtacagaaaaaaagttttcccagaaaattcttaaccataggcattcactcatacagatacccaaatggcctagaaactccaagccaagaagttgataataaaaaccacctcaggctggtaatacccctggatgcttggcaaaaacaaatgcaaaaccgctctgctccaagatacatacttgatacaggccacatagaattcccacagggtctggagttaatgaaattctcatttgttaaacaagaatgtatattgcttgctttgtgctattgagagcatatgttattcttgtataaagaaacatttgaatatatctgtgcccccccacctttgctctccagaagtgaaatgatgaagcagaatttatatgcaggccagcatctgggtatggacacacattaagcttccttctatccttgcagaggtcatggaagaagtgacaacatgctccttcaacagccctctgttccrgcaggaagatgacagagggattacctaccggatcccagccctgctctacataccccccacccacaccttcctggcctttgcagagaagcgttcyacgaggagagatgaggatgctctccacctggtgctgaggcgagggttgaggattgggcagttggtacaggtgactcttcatcccagatctgagtctgggcctcagtttctcttcacaaagctcagagctcttcaggatctgtgccttttctcatcagtacaggaaagccctgtgtggggagcagaggcagaaaaaacagcaaaaacaatggctctcactgagtgcttattgtgtgccaggggcacattgggtcctcacagccattctgtgtcgtaggtactgttttcagtcatattttacagacaaggaaactgagactcagagaggttgccatttgctcaaggttatacagctataataaagcagtagaagctggtttcaaactcagtcgctgactccagagacctccacagttatttagattcagctaacgtatgatgtgcctttcatttatattccatttaatcctcataaatcacccagggaagtaagcattggtagtccagttttgctgatgagagatcctagtgctccaagaggtaagtaacttgctcaggaccacatttagcaggtgacagggggataccagtaataaccacgcttctactactaaatgctgtatgtgaggtatattttattatccccattttgcaggaggcaaccaggcctgagaattaaggtcatttgctttggtcacgcgtctaataagtgggagaactggagttagagcccttcctcttcagtagaacattttgactgtatttttagtgaggaaagaagggttactgctctttggcctggaagctacagggttatttcagatcccaaataggcatacgtcggagatattgtggatttggttccagaccaccacactaaagtgactatcacaataaaacaagacacataaattttttggtttcccagtgcatataaaagttatgtttacactatactgtagtctgttaagtgtgtagtagcattatgtctaacaaaaagtacacaccttaaaatactgctgaaaagtgctaatgattatttgaacctttggctagtcaatctttttgctggagtgggtcttgccctgatgttggtgactgctgacttatcagggtggtggttgctgaagatttagtgtattattattattattattattattatttttctagaagcatttcttacttacatagataatttcttaaaataagacaatgggctgggcacagtggctcatgcctgtaatcccagaactttgcgaggccaaagtgggaggattgcttgagctcaggagttcaagactggcctgggcaacatagcaagaccttatctctaataaaaataaaaaacattgggtgggtttagtggcacacatctgtagtggcagctactcgggaggctgagggggaggattgcttgagcccagaagttcaaggctccagtgagctgcgattgtgccactgccctcccgcctgggggacagagyaataccctgtctacccccaacaagaaataagacaacaatgaagtttgctgaaacagttgacacttcctttcacaaaagatttctctgtagcatgcaatgctacagaatttgatagcatttttcccatagtagaacttataaatgaatcctctcaaaccctgctgctgctttatcaactaagttgatgtaatattttaaatcctttgttgccattttgacaatgtttacagcatcttcaccagaagtagatcccatctcaaaaaactactttatttgctcatctataagaagcaactcatttattcaagttttatcatgagattgcagcaatttagtcacatcttcaggctccacttctaattctcttgctatttccaccatatctgcagttacttcctctactgaagttttgaacccctcaaaatcatgagtatgggaatcaacttctcaatgtctcttaatgttaatattatgacctcccatgaatcatgaatgttctgaatggcatctagactagtggaatttttccagaaggttttcagtttactttgaccagattcatcagagtaatcactatctatggcaactatagtcttatgaaatatttcttaaataatgaaacttggaagttgaaatgactccttgatccgtgggctacagaatggatgttgtattagtggccgtgaaaacaacattaatctcctcatacatctccatcagagctcctggatgacaaggtacgttgtcaatgaccagtaatattttgaaaggaatcttttttcctgagcagtaggtctcaacagggggctgtaaacagaagtgcttcatccaggctttgtttttagagcactggcagagtagatttaggataattcttaagagccctaggattttctgagtgataaatgagcattgacctcaacttaaagtcaccagcccgtcctttgaaggtttgaagccagacattgacttctctctagccatgaaagtcctagatggcatctttcagtagaaggctgttttgtctacagggaaaatctgttgtttggtgtagccacctttgtcagttaccttaactagatcttctggataactggctatagcttctcccatcagcacttgctgcttcaccttgcccttttaagttacggagacagcttcttgccttaaacctcatgaaccatcctctgctactttccaacttttcttgtgcagcttccatacctctctcagcctttgtagaactgaagagagttagaactttgccctggtttaggctttgtcttaagggaatgctatggctggtctgatcttttatccagacctctaaagctttctccctatcagcaataaggctgttttgctttcttatcattcctgtattcactggagtagcacttttaatttccttcaagaacttttcagcctggtgtggtggctcacgcctgtaatcccagcactttgggaggccaaggtaggcggatcacgaggtcaggagttcgagaccagcctgaccaacatgctgaaatcccgtctctactaaaaataccaaaaaaaaaaaaaaaaaaaaaaaattagccgggcatggtggtgcatgcctgtaatcccagctactcaggaggctgaggcaggagaatcgcttgaacacaggaggcgggggttgcagtgagcagagatcgagccactgcactccagcctgggtgacaaagggagactctgtttcaaaaaaaaaaagaactttttctttgcatttacagcttggctgtttggcacaagaggcctagctatcggcctgtcttggctttcaacatgccttcctcgtaagtttaatcatttctagctttgatttaaagtgaaagatgggggactcttcctttcacttgaacacttagaggccattgtagggttactaattggcctaatttcaatrttgttgcatttcagggaataggctgaaggaaaggaagagagatgagggaacagttggttggtgaagcagtcagkacacatatagcatttatcaagttcaccatgtaatatgggcacagttgtcatactccaaaacaattacagtaataacatcaaagatcactgatgaaagatcaccataacagatttaataataatgacaatgtttgagatattgtgagaattaaccgaaacatgacaaagacatgaagtgagcacatgctcagttcagggttgccacaaaccttcagttttgtggcaatatctgacaaatgcagtagagcaaagtgcaataaaatcacataggcctatatttcttattgttgctttcctctctcccagggctagcttaagtgagacaaatgagacaatggttttgagagtcttttgtaaaaaaaatatatagttgtgtcatctctctatatctacatagtaggcactttaatactcctaacctaccctgcttttttacctacagatgtctcaaatctgaccattaaatcttcatatccacagcagataaccttcttctgctgttaaagtacacagtgcaaatgctattctgctgaacatgggccttgccatcaatccctgtctttgcttttgataacattggctcacatttctcttggtgaagttttttactttgtgggattttcagttcctgctctttcaccttatcttctcatgagtctttctcatggcctcccaggaccagacttctgcatgtataactagcctccacagaggcccagccctacagcccagtagtacttgggattctagctctttcctttcttctaggacaagcattgcctgtggtcatcgtcatgttgcactgtttttgatcacagacagtaggctgttaagcattttttttaatcctatyttttagagacaacttctatgttgcctaggctggtcttgaactcctggctcaagcaattttcctatctcagcctcctgagtagctacgactacaggtgtacaccactgtgcccagccttttaaattttaactgtctgtttgtctgtctgtctgtctagagacgagccctctctgcrttgcccaggcgggagtgcagtggctattcacaggcttgatcattgcatactatagcctcaaactcctggcctcaagcaatcttctcacctaagcctcctgagtagccgccactacaggcaggtgccactgagcccagcaagcattttttatcagaccacacctgttgcataacttcactactcagtagtcacacacatccacaaacttgtccactttaactcattctctctttatttcattctctgacttatttaattgtacaatcttgaagttagaagaatcatgagcccaattctttcccaatatagaaatctgtattctattggtagttactgaaatcttagtgattaagagcatggctttggagtcagtcaagacctatcatttattggctttttggccttggatacttgactcttctctgtttcatcagctgcaacatataattaataatagatactacatagtaagaactaaacatttgtcattttccattaagggtctccttgcacaactcttcaggtgagcacctgattgctgtggcagctggtttttatgtgtgaatgagatgatctctacttctctataattacccattggtttgttctgccttctggggcagtcartctatacaaaatgtagataaaatctctttttcagagaactactctctgaagtacctgaaagctgtattcatgccctctgagtagtctgttttctgggctaaacagcttcagttctttctgtaacttcttagggcacagtcctgatttggtttctggccccttgaaaattgtgattactgtcgttgggatctggtctgagatagcagtgtccttttttaaagtaggatactcagaattgaacttgggactccaagggtagacaggccagctcagcaatgaggtgagctctcctatcttgtattccctttaatgcaattgaaagtaaaatagcactttcttggtagctacatagcacaattgactaatgttgagtagatggtcagccaaaacctccaagtctttttcacatttgttattcttttaaaaaaaaaattaattgtagtaaaatacatctaacataaattttaccatcctaaccatttttaagtgtatagttcagtagtgccaggtatattcaaattgtgcacccaatcttcagaacttttgatttttcaaaactgaaagtctacacccattaaacagctccccatttctccctcctcagtccctggcaaccactaatctactttctgtttctataattttgactactctagatatctcatataagtggaattgtatagtgtttgtctttttgtgatggcttatttcacttatataatgtcctcaagtttcatccatgttgtagcatgtatcagaatttccttcctatttaaggctgaataatatatcattgtatgtatataccatattttgtttatacattttttttttttttgaggcagggtctcactttgttgcccaggctggagtgcagtggcatgatcatggctctgcaacctcgaactcctgggctcaagcaatcctctgcctcctgagtagctgggactacaagtgtgtgccaccatacccagctaatttwtttatttatttatttatttatttatttatttatttatttattgtagaaatggggtttcagtatgttgcccgggctccattcatctcttgatggatactttggttgcttttgcctgttgggtattgtgaataacattgctatgaataagggtgtgaaaatatctctttgggaccttgcttttaattcttttggacataaacacagaagtggaattgctggatcacttggtaattttatatgtaatgagaaactggcatgccattttccatagtggctacaccattttatattcctaccaacagtacacagtggttctagttttccacatccccaccgacatttgtcattttctggtgtgtgtgtgtggtagctgtccaaatagttgtcagggtgatacctcattgtgttttttagttgtatttccccattaattagtgatgctgaacatgttttcatatgcttgttggccattacgtttgttcttgtttttctttttcttttttttttcttttttttttttttgagatggagtcttactctgtcacccaggctggagtacagtggtcaactcggctcactgcaacctctccctcctgggttaaagcaattctcctgccacagcctcccaagtagctgggactacaggtgtgtgccaccatgcctggctaattttttttgcatttttagtagagacagggtttcaccatgttggccaggctggtctcaaactcctgacctcaagtaatccacccgccttgacctcccaaagtactaggattacaggcataagccacagcacctggcctacatttgttctttaatcagtttaccccatgcaaatttttaagccacaacctgttttatctctgtcaagcctcagcttgttttatatgtcccattgctccagctagttgagagcatcttagattccaagactttcatgctatgtttactcttttttccatcttcatgtcaactgtatgttagatatacctggctcaaataattttcttctctcagccactaaggatgactaaacttctgacttctcaaaaactagactgcttaataagtaagctgacttgatcacatatctctggcatgtttagtgtgctcagggcactcaggtatagaatgggctgtcccagagatcttgaattccctgttgaactagcttagttcaaggacggaatggtcttttatccagaagactgcgaggggactcttccgtgggatgggagttagcactagataacccttatggtccataatggcttagatttcttttttgtttttgaaacagggtcttgatctgtcacctagggtggagtgcagtgattgatcatagctcactgctgcctcaaactcctggacttaagtgattctcctgcctcagacttccaagtagataatgtaaaaattatctagacccagatcatgtaaaaaaaaatgttttgtagagataaggacccactatgttgcccaagttgatctcaaactcctggcctcaggcaaatggctctgagagtctatgatctgcgcctgcttaatctgttttgtccatttatacagaaattaattttttaaatttattttttgttttaggtagttaatacatttcatatagctgaaaaataaaaaaagtataaaaagatatatatctcatttccattcccctacctcttataggcaatcactattgtttcttgttatctcttcagtgctgcttcatgcagtagcaaagcaaagaagtatgtactcttaatagcccttttaaaaacttttaaaaatgtgaagtgataacatatacagaaaacataaaacataaatgtcaaatgcacaaaacataaatgtcagctcaatgagcccttatgacaaagccaacacttgtggactcatatatagaactcacaactaatattccaagaaatagaatgtcgtcagcatctgagaagcttctcttatggccccaccctccttcccaaaggagaagttgattatattaagttgatttatagccctagagtttagttttgcttatttttaatctaygtattcttttggtctggcttttgttcagtattcttgagatttatccaaattgttgtgtgtaaccctaatttgtttttcattgttacatagtattctatcgtatgaacataccacaattaagtgatccattttaytgttgttggatacttgggttagttattataagtatagattatactgctgtgaatattcttatacatgtttttggtactgcgggcatacattttgttgggtatgtagctaggagtggaattactggctcatgtggtatgtgtatgttctacctcaatagataatgtcaaccagttttctagagtgatggttttaagggttgttctgcctcagttccatccttattccttggatttggccctttaaggttccatctcaaattacatgacagtttaccaggccttcaagttttgtccttctgctccataaggttgtcaaatgacttgctcagcttctcagcctttcagttacttctttgagaattagtaggataccctaagggaaaaagggaccagccaacctctctgaaagaacttagcctgtcattcttcattctcttgtttgctctctggtgctttcagatattttgtttttgtttaaatattttatctatcttttcaagttctcagtggaaggattggtctaattatttagtttgctgtaaccagaagtccctttcctccacatttctgatgcaaaaggtagcatactacatacactattctgtattttgctttctttatttaagaataaattatgaaaatcaggccaggctcggtggctcacgcctgtaatcccagcattttgagaggctgaggcaggcggatcacctgaggtgaggagtttcagaccagcctggccaacatggtgaaaccccrtctctactaaaaataaaaaaattagctggacgtggtggtgcaagcctgtaatcccagctactgaggagattgaggcgtgagaaccacttgaactcgggaggcagagattgcagtgagctgagatgacaccactgcactgcagcctggttgacagagagactccatctcaaaaaaaaaaaaattatggaaatctttccatatcactatatatggaaaaaaggtcttcccccatgtattgcatgttcatttcacccattctgtattgacgaatatttgagttgtttgtagtattctgctacttcaagcaatgctacatttgaataatcttatacatacttaatttgatgagcagatatatcttaggatgaattcccagaattgggcatgatgggaaaggataaatgtatttgtaattttgatatatgtcctacatacaggttgaaccatttgcacttcaatccatatatgaaagtgccagtttcttcacatttgccaacacagtattgtcaagctttatgattttgctaatttgatagatgtaaagtgttatgtcaatttagttattttgttttatttttatttttagagatggggttttgccatgttgcccagactggtctcaaactcctggactcaagctattctaaagtgctgggattacagcatgagccactgtgcctggccattgtcagtttcgttttaatttgcatttctctcttatgagtgaagctgaacttttttttctctttctgtgagttgtctgatcttgccctttgcccatttctgttggattcctggaaattttcttaccaatttctactattgttttgaaaatatgttagggagattagacctttctttatttgcaatatgtctgattaggcattatctcattgtatccttataataactcctctgtgaggatgttattaaattttccatttaactgataaagaaattgaggtaaagtaagattaagtaacttgcccatagtcacaaaataagtgatgaaagcatggtttgaactaggtgtctctgaatctatgcttgagctttcaacaaaagttatgaattgccttcccagtgtagtacaggagggaaaaaaatttgtcttaaatttccttttatttgcttaaaatttstgtatttgtttgccttgcttttcttttcttccttttcttttttctttctttcctttcctttcttttttttttctttctttctttctttgtaaaaatatttagcacctattatgtaccaggggctggagaatcaatattagtaaccaatagtataagccctgaaaaggctcatagtctagaaaaggaagacagtcataaaaagttacaatgttatacaataaatgtattaggggaggagagtgagtttcatggaaggctttataaaggaggtgacttttgagttgggtatggaggatgatttggaagtctagatgaaatgaggaatagcattccagacagaggagacagcttgtacaacatttagcattgtctctttccagctttgtaagttatcctgtaatatccgagaatttagtgagtagttaggccttcgtgattttatagatttcaatatcatttatttcttatttatgaaaaatactaatacttttaatgagcttcatgttttcctattagtatctcactcctactttctcccttctccttgtctagtgggggcccctgaagccactgatggaagccacactaccggggcatcggaccatgaacccctgtcctgtatgggagcagaagagtggttgtgtgttcctgttcttcatctgtgtgcggggccatgtcacagagcgtcaacagattgtgtcaggcaggaatgctgcccgcctttgcttcatctacagtcaggatgctggatgttcatggagtgaggtgagggacttgactgaggaggtcattggctcagagctgaagcactgggccacatttgctgtgggcccaggtcatggcatccagctgcagtcagggagactggtcatccctgcgtatacctactacatcccttcctggttcttttgcttccagctaccatgtaaaaccaggcctcattctctgatgatctacagtgatgacctaggggtcacatggcaccatggtagactcattaggcccatggttacagtagaatgtgaagtggcagaggtgactgggagggctggccaccctgtgctatattgcagtgcccggacaccaaacaggtgccgggcagaggcgctcagcactgaccatggtgaaggctttcagagactggccctgagtcgacagctctgtgagcccccacatggttgccaagggagtgtggtaagtttccggcccctggagatcccacataggtgccaggactctagcagcaaagatgcacccaccattcagcagagctctccaggcagttcactgaggctggaggaggaagctggaacaccgtcagaatcatggctcttgtactcacacccaaccagtaggaaacagagggttgacctaggtatctatctcaaccagacccccttggaggctgcctgctggtcccgcccctggatcttgcactgtgggccctgtggctactctgatctggctgctctggaggaggagggcttgtttgggtgtttgtttgaatgtgggaccaagcaagagtgtgagcagattgccttccgcctgtttacacaccgggagatcctgagtcacctgcagggggactgcaccagccctggtaggaacccaagccaattcaaaagcaattaattggcttaggacccaatttccatagatgcaaatggcagttacagacaggttaacagaagctactgaagtctacagataatmaaaaaacttaatattctgttccctaccttttttcacttttcctcctccaaagagcaaaatgaaaattttgccttagctactgcagtggaaagagcactgaactaggagttggaagacaaggatgtggtcctggctctgccactggcttgcttttggaccttggatgtgtcacctgaactctctggacctcaggtttccatctgtaaaatgagagtattggttctaagatttctcatcttctcatccctaggacaagcatagtgcctgcatgcttcatgatcagtaagtcctggctgcataaaggactctgatgtcaaaatggaaaccaggggacttaccttttcacatgacttacccctcatccgagtgtgaggttacaagcaggtgtcatggcaggaaggaagaccagatctgtatgatttgttccatttttaataacaaaaatatccacacccttttaataatgctcagagttctgtaggctctctatcctagaggaattgagcaaaacagaagaatcatgaagtctcctaccttctacagccttgtagttctgcttaccttctcttcctcatccagaaagcatcattttctagggagaacaatgagaatctcaatgccagtagtactggataatagtgcgtattgcttctggtggcattaccctgatgatgggctgaagttcatttattagggtggttcctgatgggaaaaggacatggattaggactttaaaacactggacagaatttcccacagtctttgccctcaaggagttcaccagtttatggggctagaagagcgagaaaattcaagaaaataaatgtagctggtgggagactttgtagatgttgggctatatgttggggtgatggtagctcctgatgtaattttcttagttgcatcttcaatatgcctggagtcgtctgtccaaggcttgtccaggcttctgggtttctctcaagtttgtttttctcaggatattgtcctggcccagctactcctttacctgtgagaagatcttcaccattaggaagatctctagacccccagatctcagaatcaggcctatttgtgtaggcccatggaaatcactacttgtgaagtagagatgcctttttgtctaatggttttcgtgctgaacttagttcatgctgagtctctcagatgataccacgttggttgttcctatcttagattgtttctcccatagcctgttattgcaacagaaattctatcatgagagatttatttttttgtccctattttaggagtctaatgcttaaactggtatcaactaaatatatttggtgttgtacaatgaccacagagaacaagtcttagtcatgaaatatagcctaggagactaggggttacagttgcactagttgggtagagagagtcctacaggataaaagtggagattaactttacctactttagcagattgcttaagccatggcttagagtggcttttaaaaatccccttagcctctcctacatttgccaaggtaatcttcccaatacacaattattcactcatgtatacatttatctaaatatttcttgagtgcctaatacaaggtactttctactgccattccttggctctaaatcatttgtggttctccattgcctattataatgtaaagatgtttacatttagcctggcatgtaggaccttccagctgttgggtgaaataatgcacactttcctctacttccttatatgaggcccactgtcagggaaaacctctgtcaagttggcaggtggagggtggtggaggtctagggatgggcaggattggtgcagggaggaattggggaaggggagaggattaaaagggcagccccctcctgagtggtagaaactccttgtttagcaaagctttcctgaacactgtactgcaagtggataggaatagggaggatggccaagtcgtacaaccagggctaaaggatgaaaagaatgagaatatcaacttcttttttttttttttgagacagaatctcactctgtcgcccaggctggagtacagtggcacaatctcagctcactgcagtctccgcctcctgggttcaagcaattctcctgcctcagcctcccaagtagctgggattacaggtgcctgccactacgcccagctaattttttgtatttttagtagagacggggtttcaccatgttggccaggcttgtctcgaactcctagccttgtgattcgcctgcctcggcctcccaaagtgctgggaatacaggcatgagctactgcgcccagccgagaatatcaacttctttaggactactcaagaagggagtcaaggcagggaccttggtctgtgccactgtgacgcagagatgtataataccagtactcataagaggtccatctctaaattgccctcctcttacttcttccccctgcctcatgttttttctctttaatgactagcatcgaaactctttaaatggggcaggcctgtgttcttatctcaggaatagtaagaaaagggggttgggaacaggggaaatccagaataaagacttgagaaaggaacagagtgggtgatggcagctatgaagaaaaaacagatcagaagaagagtcctggcaccttaggaagagaaagtgtcacagacacgaggcctaggctagagagatggtgtaggtggtagctgctgtgaagaagaaatgacaacaggctggagctgttccctgaaacctgtgggaaggaagagagacctgcacaggccggcacttagcttgtggagaaggtcctaactcaacactgcaactttaagctggcttaacttgtccaagttccagatgaccaacaaagacagctatagacactctaactctgtgccaattacccaaggccttcagggccctgggacctattccatgatagtggtaccctaactgaacccatttcagccactcagattgatagggtggaaaagacagggcaggtggtagcagctgtgaagaaaagaggaaagcagaagggtggcctataatctacaggcatgtagagaggactacataggcctctgttctttgccctcaggagcccccttcctgtcccttggactcagaatggatccttccagcacacatggcccaacactgagagtgcaggaagcatgggtaggggcctcctgctgctggtatgtacccaggccagcctcctgccgacacagcctactggctgggttcatgttcttactattcacctcaggccattgtctgggtgcttaatttgacttgtttcccctggtcaccagtctcccctccgatattcacaggacatcaagcagcttcagccacgggtaagaggcttttcaccctgcctgttgggtagcccagaggacccacaaaggtcaacctgagtctccacagcctcctccccagggcagtaggaattgatatctcacttttgccagattaggcttctcactcttcttgagtaggccataatccacctcttcagtaggccatgcatcttgtctctgcagtgccagaattcacagtctgggcctccctttggtccttaccataggctgccatgtattattgtctatgttgtgccctgtaggcctctgctaggctgtgaactccttgactgactcctcactgtgtcctttttaccttgaatcacagtggcttatctaaaaatataagcttttttctgtcatattctgaattccctgaaggtaaggactatgtctgattcctctctttgtcctctgcacccagcgtagggcctgaaacagagtagctagcagtaaagatacactgaatgaatgaatgagtcaaccatccttggcctctggagctaattgagaaggctagggggagttccgctgtagggagaaggatgttgcatccctttgtagattgtgtagcattcaaaacctgctgaacactcaccctcaatgtatattctctgttctggcctgcttcaaggtcagttacactacttcctgggatgggcctttctctggcttaagcttggttgtccctggctttcccaaggatcacagcccaaaaggcacagtggggaaaatttatggcctattcgagaagagtgagcagcctaatcaagccaagccttgatttggggttctcacttcactggtattttccctctgtccctaattgggttttctatagttactagttttccaggcctccaagggagattctgaggcttgatgtgttctgactgtgtcttggctttgtgatgctgagtgccagaaatactctgtactataaaaactaccatcgttctttgaaacaacaaagaggaataaagaacttaattctggtgactattgttttttttttcttaaactataagatgactattatactaatatctagtttgtacccaacttgttttaaaaaatgaatttgaggcaatttcttggtttttcataagaacttttactctcagaaactttactaatgataatcctttgcacttttacacattgttatttgaacttaattacctattaagggaagcagagcagggattacaatgcctgcttacggaatacaatgtcatacactagcttttaagaggaggagccagaggtacagagtcaccactgacagcagtgctggtgcttgccactgcatatcttacccttttttcaaaacaccttgagattattctcaacttgtagctgaaggggccacaaatatttattaacagccaaatcaagtggaatgatagctttaacttaactgctaatttttacttgactttgtttgttccattgagacgtttaaggcactactgaatttggccaaatttttcagcataactccttaagctctgtcagtaggtcagtctgctctcttaatttcactattggaaagctttcaggctgggcatggtggttcatacctgcaatcccagcacttttggaaagctgaatcacagaaaaacatccttggctggtggagaatgcctgtgtcagtagaaaactgaaagaagggagccaggcagaaactgataagggttgagaggcggcaagagtcctgatgatagccagtagggtccttcactgttgtgggaaccagtgacccaccagcctttatttcttaagctagcttgaattagacatatctatatatgtagcttgcaaccaaagaatttaagtacccatcctcacagaaacttgattaattggtacctaaacttgttagtcactacctggaactgaaatgtaagccatgaggagttaactttttttttttcctaagtttgcatgcactctcttgcctctattgcctcaagaagccttgatagaatccccacttgctcattgcctggcttgggtgttacagctaccttgatctcctctttggttacgttgtatgcagtttgtaatccatcttcgtcctctttgcttataagtgccttcttgaggggtggctttgagactgcttcatcaacatcatgatctggcagttttgacaaagattccttggttgattgatagtccctgagtgacgtgtccagtttccgtctgcatgcatttacagccatgcagaggtttggggacttagcgggtggtaattcctcacatcctcgtagcctaaatactttgaggaaaggaaatagttcctcaccattttcctcaatcaggcatcttctgaccatcaggaacctcatgatgtcatgacctactccagtcaacaaagctgcatggttgaaaccttcctcaatgaacctatgcattgtcacatatggtgtcatttcagaaaatgtggcaatgagtttaaattggcttataaaggtacacggggtcatccgtaggcttgggtgagcatcaagtttaaaacgaaagtatgtgattttgatgtcaaggcctttgcatgctaaccatgatgcagcctctttaaagtcacacacaggatctggatcgactgacagagacacctccaggcctgacggtagatagtagagtattaaaccttttggcgatttgtcgcattggattgccactcagcttgcacacaatgtaatatatcagaagacagctttagcgactttgcacttgtgttgaagttgctcattttgttccagtcagccatgaaccatggagcattttgaccctcttttcccaagactgatctgtctggagtaatgaattctttaagctctggaacgagggtataaagttgatcaaaagtagcaacgagcactgtgatagtaactgacacagtacctcccaaagtgagagagtttgcttttggaattgaaggaagagctgtgcaacaggcagcgtacacatcttaagtgaggcaacacaatcacaggttgatcaccttcgctatgttctagtggcatgtttgcaggttccaatcactaggagctttaatggctttgttaacctgttggtgatgtcgcatgaagattgtctgacaaattactttaaatactaaagtttgataaacagtattacctaacagtacattaccaggagagacattgggctagaacagagagagaactggactaggaggagccaggagttcaaggtccttgtcctagagcttgtcagtgacctgatggatgactttgtgcaagtcactggccctcctgggaaccagttgattcagctctatcatgagcacaacccttgcccagccccctcaccagagagtggtgtagatctgatgagtcagtgaatcctcaaaagggtttagaaaacagtgaagtgttgtgtcaataggaagaagataaattgccatcctccctttgatctccattatccttcagcactggcaagatttgactgttggatgctaagaatgagagtgatgcagaaagaggggaggaaggcagggcccactgaggagggaactccaaggtggacgaccgtcatgccttgcctcagtccatccttagcaactgcaggcctgatgattttcaccaaccttctgactgtgccccagactttttgctcccctgctatgaggaacaacccagcctgggtatggaagagggaaatctcagccccaagtagttgggaagggacttggtctgagtggtctctgtcctctgcccaccacaaggccaggtatattacagtataggaagaagagtac

SEQ ID NO: 95336 - DNA, 17855 bp, Homo sapiens
tggtcaccagaaagaccaacaatgtaattagagggttgggtcaatctcctaggagaggaggaggactgaagattgagtccagtcatgtgaccaatgatccaatcatgcctatgtaatgagaccccaataaaaactctgaacaccaaagctcagtagagcttcccaggtggtgaacacatcagtgtgctaggagggtaatgccatggggagaggtcatgaatgctctccattcagaaccctcccagactccacccatgtggatcttcatttagctggtcctgatttgtatcattagtgctttcctgagttctgtgagtcattctagaaaattattgtaccttagggggtcatgtgaaactttgaatttacagccagtgggtcaaaagcacaggtggcttagggaccccccaaaatgcagctggcatctgaagtgaaaatagttttactggggattgtgccattaaacctgtggagtccaatgccaacactgggtggtcagcatcagaattaaattgtatttctgtacaccagtgtgtgtgaggatgctacctcagaaggtagtaaaagttaagaaaataaacacaaagcacttgtcaataataatagcgattatctcataaggctagaaggattcagtaagataaaattcatgaagtgcttagcttagtcatagtacttgagactgttgtgagccacacactatgaaactcataatttgtccattttaattgctaagtaatattccatttcatgaaaataccactgtatatccattattttattgatacttcagcagtttccagtttagggtattagtaataaatttgcagtgaacattgtcatacaaacgtttttgtggtataagtgttttcatttactgtgagtaaattcctaggattaaaactaaattatagggtcagtgtatatttagttttataagaaatgccagatcatttctgaaagtgtttgtgccattttacactaccatcaaaacaatgtaaacattttacactaccatcaaaactgtaaaacaatggtaagtatctgtgtatctaaacatatcaaaacatagtaaagggagagtaaaaatgtggtatatagggcacttaacatggctggaagttgtcgtggatgagtctgtgtgtgaacagtgagtgaatgtgaaggcctaaaacattgttgcacactactgtaggtgtgaacattgcacacttaggttacactacctttaaaatatttctttcttcaaaaacaagttaaccttaacttactgtaacatttttattttataaacatttaaatatttaaactttttgactcttttataatggcctaaagcacacactgtatacttgtataaaaatattttctttctttatatccttattctataagcttttttctatttttaaattttttattttttaaaaatttttaaaattttttagttaaaactaagacatacacatagtagcttaggcctacacagcatcagaatcatcaggttgtcactaggcaacakaaatttttcagctccattataatcttatgggaccaccatcatacatgtggtctgttgttgaccaaaacatcattatctggtatgtgactgtataacaacaaaggcaggttgaaagtaagagggtaaaaagggatatatcatgcaaaactaaccaagggaaagcagagtgactacaatattatcagattaagtaagcttgaggggaaagaaaattattagagatggagaaggacactatataataataaaagggtcaattcaccaggaagacatagcaatcataaatgtgtatgtatcaaacaacagagacgcatatgtgaagcaaaaacttatagaatccaaaggtgaaatacataaatccacaacagttggagacttcaacacccctctctcaacaaccagtagaacaatgagacagaaaatcagcaaggatatagagcaactcaccaacatcattaaccactgattctaattaacatttatagaacactgcatccaagaacagcagaatacacgttcttttaaagtgcccatagcttgaggccaggtgtttaagaccagcctgggcaacatagtgagaacctgtctcttaaataaataaataaatggggggtgggggaagctcaacatcactaatcatcagagaaatgtaaatcaaaaccacaatgagacaccatctcatgccagtcagaatggtgattattaaaaggtcaaaaaataacagatgctggcgaggttgcagagaaaaaggaacacttttatactgttggtgggaatgttaattaggtcaaccactgtagaagacagtatggtgattcttcaaagacctagaggcagaaataccatttgacccagcaatcccattactgggtatgtacccaaaggaatatgaattattatattataaagatacatgcacatgtatgttcatttgcactattcacaatagcaaagacgtggaatcaatccaaatgcccatcaatgatagactggataaagaaaatgcggtacatatacattatggaatactatgcagcaataaaaaggaaccagatcatgtcctttgcagggacatggatggagctggaagccattatcctcagcaaactaacgcagaaacagaaaaccatacaccacatgttctcacttacaagagggagctgaatgatgagaacacatggacacatggggtgggggaacaacacacaccagggcctatcaggggtggagtggggagacggagagcatcaggaagaacagctaatggatgctgggcttaatacccaggttatggaatgatctgtgcagcaaaccaccatggcacaattttacccatgtaacaaacctgcacatcttgcacacgtacccctgaacttaaaagttgaagatttaaaaattcatctaatgaaactagtatttcccttctactcaaatcaggcaaagaagtacaaaagaaagaaaactacaggcaatatccctcataaacttagatgcaaaaaatccttaacaaaatatttgcaaatcaaatgcaacaaagtagtaaaagatttatacagctgggatttattccagctatgcaaagctagtcatcattcaaaaatcagtcaatgtaatgtacacattaatgggctaaagaaaaaccatgattctatcaatcagtacaaaaaaagttttctcaaatttcaacaccattcatgataaaaactctgagaaaaatggtagtaaagggagaacttcctcagcttgataaaaagcatctaccaaaaacctatagctaacattatatttaatggtgaaagactgaatgttttccctccaagactggaaacaaggcaaggatgtctgctattaccactcttattcaacatagtactaaagttttagtcagtgctctaaggcaaaaaaaaaaaagggggggggattacaggcatacacatcagaaaggaagaaaatagaactgtcccaatttgcagatgacatgatggtctccatagaaaatcctaaagaatctacaaaaaactcataggactaatgagtgagtttagcaaaaagtaggacccaagataaatacacaaaaaatcaactgcatttctatatacttgtagcagacacagaaattttaaataccatttacaatcactcaaaaaacagtgaaatacttaggtataaatctaacaaaacacacacatgatgtgtgtgctgaaagctacaaagtgctgatgaaacaagtcaaagaagatctagataaatggtgagagatattgtgttcatggactggaagacccaatgtagcaaatatgtcaattctccccaagttgatataaaagtttaatgcaattcctataaaaatcccaacaagattttttttgtagccaccaatccagatctaccaacagtacttttttttttgagatggggtctcgctctgtcacccaggctggagtgcagtggcgcaatcttggctcactgcaagctccacctcccgggttcatgccattctcccgcctcagcctccaaaatagctgggactacaggcgcccacctaattttgtttttgtatttttagtagagacggggttccactgtgttagccaggatggtgtcgatctcctgaccttgtgattcacctgcctcagcctcccaaagtgctgggattacaagcatgagccaccacgcccagccccaacagtattttttagacatacatatcattctaaaatttgtgtggaaaggcaaaggaactagaataactaaaaccattttgagaaaaaaataaagtgggatcaggctacctgatttcaagatttattatacagttatagtaatcaagactgcagggcaggttgaatatcccttgtctgaaatgcttgggaccagaagtgtttcagattttttttttttttagtttgaaatatttacacatacacaatgagatagcttgaggataagatcccagtttaaacataaagttcatttatgtttcatatatactttatacacatagcctgaaggtaatttcatacaatattttaaataattttggcatgaaacaaagtgtggatacactgaaccatcagaaagcaaaggtgttaacatctccgccacccatgtggacgatctgtgattgtttggcatcaccatcattcctgattctgaatttatatgttaccgataagcaatcatttttttacacttattcacacataagtacttaacagtaaaaaaaatgacataccagtaatacaacgaaaaaaatagtgtattcaggttaagtaagccagcacagtagtgtcaccagaatacctgtatcagctgttaagcaacaataacaaataacagtaggctttcagtttccaagtatgatgctgttttgactaaaaggttactgtacactgtattttattttatttttaggtgagaagaagcatcagaagcagttgagggaccaagaagtgggtcctgtagagaggaagaagcattcctctggatggcttttttaaatgtttctttcagagtcatctgcctcattaatgatgctttttgtcttagaagtctctctttgattttataaactgacatgatttcttgctctgttatgaatgcatgctgctctagtcctttaataagcccatcacacatttttaccatgtcgtctataggcactttttctgcagtgttaacatcatcttcattatcattatcatcatgatcatcttgattcagaaccatttttgttacttcaccattggacaatgaatgaacaactggagcctcattattactgttaaaaacatctttgatatcctcttcttccagcttactgacagtctctggatgtatattttttgtatatgtaaggaggtcagacattatttttttctcacttgacatactgaatccttcaaagttaccatcttgttcatcatcattactgaacttgccagtaaacttctctgttgcttcatgaccagcagatgctttattgccacaagtctttaaaaatttaatgccatgtcttttcttaaatttctgcaaccagcctgttgaatattcacagttcccctcaatttttagttcattgtgatatatctttgcttgtttcatgatcagcataccattaagtggcatgtgttcactgcgacgctgacggatccactctttcaatacacgatcaagatcttcatttttagctttatgaagtgtttttctatttttcattaatatctgctcatcactttcagcataaaacttcaacagtttatccttctgtttcttcaggtcatatatggtggtcattccaacaccatactcttccgtaagatgtttcacacttacaccactgtccagtttctccaacaacttgactttctgtgctatagataaacataaatgcttcctctttttcttatcactgatattcacaggggtatctttaggtctttttgacattttcaacaatatatttataccacacagcagagaataagcaaaaaaaygcartgagtaatgcacacaggtcttggccccatgtggggcattgtgggaaacctgttgttggcgtgtccagcctgcacrcatgccatttaattactttttgtgggaatgcatggggaaatccaggtgtgagcagaaaaactgcagcagaagagagctgggggggtcttttttcccaytggggatgttgcatgaactgggtgttgtgcacctgtgttttgactgcaactcacataaggtcaggtatgaaattttccatttgtggcataatgtcagcactcaaaaagtttaggattttggagcatttcagatttcagatttttatattacggatgctcagcctgtattggtagaggaataaacacatagatcaatggaacagaatacagaaactggaaataggatcacacgaatatgtccaactggttttgacaaaggcataaaagcaattcaatggaggaaacatagccttttgaacaaatggtgttggcgtaatgtaacatgtatatgcaaacaaacaaaaaagaacaaccgcaacaacaaccaaagttttacacctattttaaaaattaactcccattttgtaggttgcctgttcactctgatggtagtttcttttgctgtgcagaagctctttagtttaactagatcccatttgtcaattttgtggggggggggagggatagcattaggagatatacctaatgctaaatgacgagttaatgggtgcagcayaccagcatggcacatgtatacatatgtaactaacctgcacattgtgcacatgtaccctaaaacttaaagtataataataataaataaaaaattaactcaaaatgtatcatagacttaaatgtaaaataaaaaatctttaaaaaaataggcagtagaatgtcttcaggatctagggctgggcaaagagttattaaaccaaaagcatcaataaaaggaaaagtggataaattggaccttatcacaatgacaaacttttgctctgcaaaagatacrgttaagaggatgmaaatacaagccatacactgtgagaaactgtttacaaagcacatatttgacaaagggctaatatctagaatatataaagatatctcaaaactcaacagtacgaaaaacaattaattagaaaatgggcaaaagacatgaacagacatttcactgaagggaatatacacatggaagataagcacatgaaaagatgtcttacatcattagtcaatagggaaatacaaattaaaatcacaataagacaccaccacacacctattagaatggctaaaataaaagctaatgctcatgaggatgcagacaaacttgatcattcatacactggtggtgggtatgtaaaatggtacagccgctctggaaagcattttggcagtttcttaaaaaacgaaacatgtaactaccatgcaacccagcaactgcactcctgggcatttattccggagagatgaaaacttagttcacacaaaaacctgtacacaaatgtttacagtacctttactcagaatatctgaaaactggaaacaacccaggtgttcttcagtgagtgaatggctaaacaaactgtggtacattcatactatggactactactcatcaataaaaagaaaygcgctattgatacatgcaacaacttggatgagtctccagataattatgctgagtgaaaaaaaaattctaaaaggttgcactctgtatgattccatctatacaacacagacgtttgccaggaattaagaagcagtgtaactacaaagagcaacatgagggatccttgtggtgatgaaaatgttctgcatcttgactttatcaatgtcagtatcctggttgtgatattgtactacagttttgcaaggtgtttccattgggggaagctgggtaaagggtacatataatctgtccatattattccttacaactgcatatgagtgtccaattttctcaaataaaacatttaattaaaatagtacatatgtgatttctcttgtccaaaccctgattgataatttgaacccttcatcagactggaaaatttctcttctattcctagattgctaagtattttggtcagaagaggtgtttatttttgccaatagatttatctgtattttttaacataatcatagcttttctttaaaaaaawtttttattatttcttccaatgaaggcttttctcttttaaggtaaattacattgtttgatttcagaatgcaaaaccaaccttgcattcccgggataaaccctacttcatcatgatgtattaatccttttataaattgctggatttgatttgctaatatttgcttaggatctttatgtctatgtttatgaaatgtttttcagacacctatggtgtctgaaaagtcctcagtaaaaattcattgaattcagacttgtttaaatgatactctaactgcaacatagctgatgttgtggtccagacaccccctcagggcctagacagtcattccctcagcttctggagttggttactgatgatwcacaactgagtccttctcygggggccgccctccaccgagggaagcagtcttgccaaaaaaaaaaaaaaaaaaaaaaaaawtcmcagctcctccccaggtgtagcctgtatccatgactggtcaatgcaaggataagagtttctggcccccttgctttaatgtggaactactctgaagggtcatcctaggctccaagcatgccttgggattggtcaaggcctctgctgcaactgttttgcaggccaacttcttcctctgcctacaaattcctgcttccttcactttcttacaggtgctgatctttaagttctccctacctccaccaataaccttgtaggcaagctaatctccctcttgcgtcccccaggggctcaacacaggacacaccacgttaccctgttttatttttcttttcatagcatttaacaccttatacgtgaaataaccttatttacttaayacttaaaatacttatcgtctgctstaagaatgtaagcttaccaggacagatctttytcatacgctatgcaccgctgtatcaagcgcctatggcagggcctgcagaacacagcaggcactaaatactggttgttgaatgaaccgatgagtctggccccgcgcttttggtcctgggatcacatatcccccctccagcttttaacacgcacctgggagctgcggctcggggtgtgcccccgagtccccgcccctcaggccacgcccccaggcccacggagagggcggggccccgcggacgcaacggtgggcacgatgcggcaacccgccgttcggytggtgcgcctgggtcgggtgccgtacgccgagctactggggctgcaggaccgctggctgcggcggctgcaggccgagccaggcattgaggccccgtcggggactgaggcgggcgcgctcctgctctgcgagcccgyggggcccgtgtatacggccgggctgcgcggcggcctgacgcccgaggaaactgcgcggctacgggccttgggcgccgaggtgcgcgtcacaggccgcggtggcctggccaccttccacggcccgggccagctgctttgccacccggtactcgacctgcggcgtctcggcctgcgcttgcgcatgcacgtagcgtcgctggaggcgtgcgccgtgcgcctgtgcgagctccagggcctgcaggacgcccgcgcgcggcccccgccctacactggcgtctggctagacgatcgcaagatctgcgcgatcggtgagcgccgcggcgcagggcggtacctgagagccgaggtcggagcttgaggcctgggggcggggtctgacggggctggaccaatggaggtgagggccgggaggaggcgtatctagcgcgggttttgaatcacagctacccgctgcgtttgagtttttaagccccttttcagatatcgtatattcagaagcagaaggctcctcacatctagtccaacacgcatttctgtgaagggagagacaagagaagtgaattgccaggttacgtcctgcgaatgacaatgtcatggcaaataagggtgctaattttcaaacttttttttttttttttttgagacagagtctcgctttgtcacccaggctggagtgcagtggcgcaatctcggcccactgcaagctccgcctcccgggttcacgccattctcctgcctcagcctccagagtagctggggctacaggcgcccaccaccagcccggctaattttttgtatttttagtagagatggggtttcaccgtgttagccaggatggtcacgatctcctgacctcgtgatccgcccgcctcggcctcccaaaatgctgggattacaggcgtgagccactgcgcctgtccccaagcttttttttttttaagtattggaatctgttaaaagacatttcctggaatcctcatgatgagtgcagctgtcttgaagccacgcaccccttcctttcatttgtttccttttcccatctgagtacaatcccttgtttctccagaaacaaaatttgaaaaccggtgatctaatccagttttctcatcgccctgagagggacaccaaagcccggagagtggagggtatctactctaagaccctttggcttgccttgcaggagtccgctgtggaaggcacatcacatcccacggcctggctctcaactgctctaccgacctcacgtggtttgagcacatcgtgccctgtggactggttgggwcaggcgtcacttccttgagtaaggagctccagaggcacgtcaccgtggaagaagtaatgccacctttccttgtggcctttaaggagatctacaagtgcacactgatctcagaggacagccccaactgaagagtactcataacagccaggatgctcctgccttgggaagcatgaagtctgacttgagtcacctactgaaacccagattttagacctggcctgtcattcactgatcatgaaactaaggacataccatgagctctgagccactattttcatatgtatcctgttttatttatatcttycccacctacctcagagatactagatgtgacaatactgtgaaaagcaacacatgctatataaaacattagcactgctattgacagmagtgtctcagagaaattcagatgtcatagattgttatttctcgattgttgatgtcatagattgtcatttctcrattgttgcttcctcaatactgtgtctaactgagcaattctgggctctagttcctttgattttgtgggaatcaaatctctgaatggcccaggtgaaggtgatgtgatgtagtgctttttcattctcaagagacctgggttctttctgcaataaagggaaaagggaagaaccttctaagaataaaatgggatcttaccttcctgggtttgattccccaagtttgataatttagcagtttttagttgggttaccctgagctaggccaaagactggaggaaggataagaataatttctcacactgtacaaatgccaaagatagaagtgagtttttcttatatgagacctctaaatttgtaaggctgcgtattatctgttgctgtgtaacaaatcatcaaaacttagtgacttaacagtaaacattaattatctcgtttgtgggtcaggaatttggggraagcttagctgggtgtttctaggttagggtctcacacgaacttgcagttaagatgtcagctggaactgcacttattcaaaggcttggctgggctggaggatcagcgctccatatggtgcattcacttgcgtggttggttatggttgctgacaagaggcctcagttccttaccgtgtggacctccctatagggttgcttaattgttctcatgacagggcaactggcttcccctagagcaagtcatgccaaagagagacaagctggaagccacaatgttttttatgacccagcctcagaagtcacacaggcatttctgtagtcttctaacagatgagccctgttcagtgtggaagggactgcactagggcaacagaaggtgaggattattaggggccatcttgaagaatggccaccacagcctattaagagtggaaagagcctcgaatgagaagtcaggggaccctggttccagttctggctctgtggaaaagtcatttactctctggtcttcagtttctccttaaaccagtgctgttcaatagaaatacaatgcaagccacattgtaatttgacattttctaggatccatgttaaaaaggtaaaagaaatgggtgatgttatttttattttattttatttttattttttttaagaaatgaggctttgctatgttgcccaagctggtctcagactcctgggctcaagggatccttctgcctcagcctcacaaagtgctggaattacaggtgtgagccaccatgcctggtctatgatgttaattttaatattttaattaacccaatatataaaaatatcaatataaagcaatataaatgttttcttgagatatttcatattctttttctcatgctgagtcttcaaaatatagtgtgtattttacacttatagcacacctcattttggactagctacattttaaaagtgctcattggtcmcatgaggactgaccattctcacatctaaagtccttttgagttcccagggttctgtggtctcactggcttctaggaagaaaggtgaatcctcctacatctgaggtctgattttttttaatgcaaataatttatatcaattattcaagctgaaaaggactttagaggtatattcctaccccctcattgtaaagagatgaaagcaaggcttaggaaaaaccttctcaaagtcaaagtaaattaatgccaaagccagtactgagtcttaggtataagcccctttctcatgctcttttcctgctgtgcacactgatttagagcttggaacaatatggtttacgtgtcatggacattccatcagtattacttgattgatggtttatcacctgtaatttggtccatattcttcctgggccttagtctcccatccacagggctactgctgctgttgtaggggtgtggaagtgaggagtcattgataattactttgttattattgccaaaaaggaaaataattattccaggaaaagtggagttagattctcatagatggaaggctgtgcacagtgtttctacctatctgatactcagcctccctctctagcaaccctaacaaatgaccatacaacttgttcttgaatgcttccagagactggaaaagaaatagacatgtactcagcactcatttattgccacatayggtcatactgtgttagcctcttaagtacgtgctctcatttgacagcctgttccattcttctggaccatagagaatctgtacacaattgtagtggctgatttgcttgaccttcctgaacctcagtttcattacatgaaacaaggatagtggtaagaattagatgacataattataggtaaagcattgagggtaatgttggcccagagtaaaagctcagtaaatcttatcattattattaccgtctgtcctccatgagccttctccagggaaattatccccagatcctttgagttcccctcaaggcaataggctccgcaagagtagagctgcttctgccttgtttccttctgcatctccagcatgtagcactgggcttgacatacacaacgctatttgaaaatatcgattaaggggaattgaactatttaaagtctcctcccatcctgcccatctgtctgtggaccagccccggctcatgtgtgtcccattaggtgcagcgctcacggctgagcacagcagtcttggtgtggacagaccagcacagagtacaggaaactgttgcttcctgtgctggacttgggggatacaaactggccctcatggtgctggcctgcagatgtgttctcttaggcttacaggattttatgtatgtgtgtatgtatctggttaagtttagtaattgccaacatttaaaaaatgggaaattgtcatgtaaaaatttggttttctggcttctcatgaaaattagagagatctggaaacattgggccatctgcctgatgattggaagcaggtacggttttgttgttgttttgtgtgtgtgtgtgtgtcggagtctcactctatcgccctgggttcaagcaattctcctgcctcagcctctcaagtagctgggattacaggcatccaccaccatgcccagctaatttttgtatttttagtagagacagagtttcaccatgttggccaggctggtcttgaactcctggcctcaggtgatccacccgcctcggcctcccaaagtgctggaattaacaggcatgagccaccatgcccagccagaagcaggtatgtttttaaaattgcattttccagttacctgcagcacctcccctctcttcctccacttgttgacattagcttcctggcccctgtaggcattcgagttggtgacccctaatctagacatttccttgttctgagacacagcagagtctcagtggacccatcacagtattggttttatatcgtagtcatggggagccctttaaggaagggccatgacttactcattcctgtgtccctggcccctggctcagggcctggcacagaataggcagcagaaaatatatgatagtttttaatcttcaccaaatatttctggctctctgctttctggacacatggcaggattgtgctttgtggccccaacatgggtgagtaggagcaaggttaacttcttttggttaatttatgaatggaggtggcatgtcacttctgagctggagcattgactagctggtgccaggcccttcagagtttccctctggaacagtgaccaacaacactgaagatggtggctgcttcctgagggactgcaatgatcagagccccctgctgacgatggacatgcattggagttcagccacttacatgtcacagcacaacctagcctgctataactaatgtaattgtttatattaatcagaactcttatatttgtaagtgtagaaacccaattctaacataagccaaaaaaaagaacaagggtgggggttattggaaaaggtactggagtctcatagaatccaagagtaaggcagcagctgaagaacagaaccagagtgtgaagctctttaggaacttaggtagtcttttccctcccactctctgtcatgctttgtggcatgtgtttgcttcattttgtctcgcttcagtccagctttctctatttcccaggccacctggtagaaaatggctgctgctgctcctgccactgctgctgctatccatgaatgttggggtagagtcaaggtttcttatttgagcagctgggtggatggatgctaaagatactgctgggatggagaacaccagataaggatcaagtttggagaggaagatgatgagttcagtttttaataaatcaagtttgagatactcatgggagaggcaagcagagagagccaagaggcagttgggtctggagcatgagtgggatgagtgaaggtttaggtgcagaagctctaacagaggagagcagaggactgataaatgtgagacataggctgtgtgaggcacaggctggcaaggaggagtaggccaagtagaccgagaagtagagaataagtggtgcagggacacagaatgggacattatgaccgtctcatcctctggcagtctcttcctctggcaacccggcaagataggcaaggttgttttatggatgagaaaaccaaggctccgaaaggccaagtgccttgtgagaggtcatgttgttgataagggcagggtgagtctgggctcccagtgtgggctctgaagggcaagtgaggcaggcctgcaggaggagcccccaggaacaggtggtcagtgggtaggcaaagcaggaggatgtagaacaggaggccagagttaggctgaggtctagctgtggcatcaggtcaggctactgctgtgggttcctggctctccttcctgcttggacagatcccacctccggtttcccactggggccyttccttaaggaaggaagctgagcgtatgaaggaggatatttaacaccctggctttcctcctttgaaaaagcctcttcttgtttgttcagwgtcttttcytcaaaataaacagattgtccagagtctggtgaatgagtgctgagggtgaggacgtgaccaactgcagttactagtccagtgtcttgttcccccactgaggctggcaggaaactgaacagagccagctctggcagcgtgatcaggtatcaggcacctcgctttgtgtaaaagtctctgacagggtgtccctatgttgcccaggctggtctcgaactcctgggctcaagagatcctcctgtctcagcctcccgaagtgctaagtaggattacaggcacgagccaccacacctggctgtaaaaatgtacttattctccagcctcttttgtataaaccatagtaagggatgggagtaatgatgttatctgtgaaaatcgccaccatttacccataagacaaaacttgttaaagcctcctgagtctaacctagtgtatcaggccatttttcacacacaaaaacatccttttcaggatttaacggaatctattgtttcccctaggttgaaaaacaactcgaagacgctttaaagtaccttcttgggctgggttacatggttcccagcctaggtttcagaatgttgcttaaggctagttttagaaacccttgaattcagaaaagttaattcagaaatttgataaacagaactatttaaaaactaactggaaagattatatgttctttctgaattattcagaaattatgcatcattttctttcaagaatgacagggtcagaatgtggaattccaagatagctcttgacttcctctcaagctccatgtgtggtcagtggaggcccatgcgagctcagcatgtgtactaagaagtgttagtttctttggggcccatctaccctgaccacatcatgatgttcatctgcagctattgcaaggtgttcagattgtgtaaatacaaatggcataaaaactttaaaagaagcgcaattctggaaagattaggtggactaaagcattttgtaaagcaactggtaataatgagcttacagtgggtaattcatttgaatttgaaaaatacagaaatgagcctgtcaaataccggcaagaactatggaataaaactactgatgcaatgaagacagttgaaaagatcaaacaaatgctaagctaaatttataatgaacaaattgaagaaaaaaaaggactacagaaagttcaggacatcaaagaagtcaggcaaaactcatcttgacacctcttgcaggcaaaggaaagcagctggaagaaaaggtgatacaacagttataacaggatgcagacacggaagaggtttcctaaaaatctcattgtctataaccgtttctatatttacatttgaaaatctcctttggagacttagaacctctaaattattgacttattttttatataaggtcactcaaatgaaaggtgattaaaaaatcatctacattgctgtctacaaaacatcagacaatatggatgttagattgcatctcattgttaactctttactgatagatatgtttgtaaatatggaagtgaaatgtgggcataaaatggttatgctatttggttaatggtactaggcaacatttctgtaattaatgacattcaaaaatttatggctagtgatatatataaagtaaaattttctttgcagtaaaatatgccttttattgttatagaagggaggatataaggaaccaacagtttgtatgaaaatagctc

SEQ ID NO: 95337 - DNA, 541671 bp, Homo sapiens
  misc_feature (1)...(541671): n = A,T,C or G
atttacattccaaacaacaggatatgaagttctcttttctccatatccccaccagtattcattattgcctgtcttttggataaaagccatttaactgggatgagatgacatctcattgtaattttgatttgcatttctctgatgaacaatgatattgaacatcttctcatatagccatttgccactggtatgtcttctttaaagaaatatctattcagatcttatgcccattttgaaatcagattattaaatttttttccattgagttgtttgaactccttatatattttggttattaattccttgtcagataggtagtttggaatccctactaactcttggggagtcccttcggggttgattcatctgttcataatccctgttatcaccagtgtcttcaccatcccccacctctgttctgccacaggtctgccctttgtgtcgctgtccattctactccatgatttgaggtaccaccaaggtttgtttccgcttctcctaccatctccacattggtttcagaactgtggcaattcccctcatcattttagtccatgcgtttgcagggaatttttccaaaataagttacaatgtttataaatagttatctgaagagctggtagaaaggaataacattgaggctaacttgtcactggttaccagatgtgattactctcagatcagagttacattgccaattttattaggtcacttcagtgtacatttctgtcttataaagccttcttccctgactagctcacagcccacaacccaatcacagtattcagctttcccagcaccattatacatgcccgcgagtgtacatagacactttaacctatcatccttgctcaatgaacaaagcatttgttgctaagccacagtctaaggctcatctttcgagtctttatttctatcccaagatctgcctctctccaagtctggcaaacctgggtattttccactgtctccaaaggaaatctgcccagttaataatggaattttaccctatggtaccaacaggataattactttataatataataatccaatacctgtaaagcagataaagatatagctacaacatcagagctatttgttttacaccagagcttacaaattgcggagacatacaactccttttaatatttctcaaagtttaagtaatttagtagtaagtaacatcttgtgcagagaaacaacagttcggtaatgttgagtttctctaagcctagtccagccacacttttaaaaatatctatttataattacagtttctgccttatattttcaaaaaactaattcattcatttggctggattattatcaggtataactgacctaaaacaaactgcatgtgtttaaaatgtatattttgataatttctgacatatgtgtacacccataaaccatcaacataattaagataattaatatagccattaacccaaaaagtttccttacgctgttccagtctctccctcccattcctccccattttctggcctgcctccccaggcaaccactattctgctttctgtcagtgtaaattagcctatactttctaaaatctcgtataaatggaatcatactatatgcactctattttatctgacttctttcactcagtgtaataattttgagattaatccatgttgttccatgttgcaatagttcattacttttgtattgctgcataattatttcaaaattcaattgtctattgattcgttgatgggcgtatgggttgtttttagttatgtctattacaaataaaggactacgaacatttgagtaaaagtatcrtataaacattagcttttctttctctaggataaatatctatgagcaaaatggcgacgtcatatgctttatatatattaatatttaattttttaaaactgccaaacatttctctaaagtcgttgcataattttacctgaccagcaatgcatgagagttccagctgccccacattctcaccaactcttggtattgttttttattttgttttgctttgtttttagttttagccaaactaatatatgtatactggtatctcattggagttttaatttttattttcctaatgactaataacgttgagcatttttctatattcttaattgccattactatatctttatggtaaagtgtctattcaaatcatttgcccattttaaaatttttgttttaataaattgagttttgagaattattacctattttgcttacaagtcatttgtgccatatataatttcccaatattttctcttagattatgacttttaaaaattatttaaaattatcttttgaagaatattagttcttaattccaacaaagttcaattattttttaattaataatgatattagtgtcatctgtagaaaatctttgtctaacccaaacttacaaagattttcttttatttattttgagtagttttaaaggcttgggttttacatttaggtttataatccattttgagttcatcttttttttatatagtgtaaggtatggattgtagttcatctttattttttctcaaaaatagacatcgaaatattgaaaaggcgatttgttaaaaagactattcttcctccaaggaaatgagtgtgcacctttgttgaaaatcaactcaatcaatatatgtcagactatttttagactctctctgttctattgatttgtctatattctactacattgtcttgtactacattgtcttgattactatagctttataagccttgaagttacataatttaaatattccagctttgtttatctttttccaaagtgttttggctattttagttccctartatttttatatggattttagaaacagcttgacaatttctatttaaaaatttgctgggatttttattaggattatattgactctatagatcagtttggggaaaattggtattttaacaatattgagctttctcattcatgaacatggtatatctttccatttatttgggtaattttatctttttggtagaagttaggggtagcttcatcactaacttttctttccctctggcatctaagcaattaaaaatagaaacattttctaaatgggaatgggacagtccttaaatagagcttgatgtgttttgaagtggcattttccaattattcaccccaaattcaaaactagaacatcacttataaggatggttgggtctacaaagaaggctctaaatatgctttcccagccacatgcatgattgtgactggccccagaaagctaagtactgcaagaaagcagagaccttactagctctgctctttgagagtggcatacaaaataaatatgcataggtacacacactaaaattgtgagctcactgtgcctgaaggtagcattaccaagaaaatagagaagtgggaagaggtatagatttcctttgtcttctaatacagtgtgcttggcctctgataaatgcaccctaatgaaagtcaaactcttaaaagtttatcatcagttgagtcatcccttcttctatggcgttgagtgaaagagaaggtacaggaagaacccaaaggaatttaatattattctctcttggaaaatggaaatataattccttgctttctataggacaattggtatctctcacacttgggtgggcttggccaagactctctgttaaatgtgtaagatacttacacttgatttgtagtgcagaaatgtagaggagtaggaaaggaacaaaagataaaggcgggtatgatgtggagagattctttgtagttatttagatatacatataagcacattaaaatatgaaaacgtctaagaatattttctagcttcatggaatttttttcccacatttatttggtttgttttttgggctaaaaaaacaacaaaaaagagaggcagaatttacttaaatttaaaggcttctatttaatgcatttttttttactgagttattttctgtattaagatggtgaatttctcagaaaaacatatagcaacctactctagaaatgtagtagcctagaaatgactcaaaaatgtatggctctttcttctagcaattgctagtatggaatcaatatgttggggactattgtgttcactgctgtattccaagtgccagaaccagaactgacatctagcmggtgccaaaattctatcattagaaacgcttttgattacttctgattcccagtgatcttttccttatcccaactaatgtagttgggttctaaattgcattgtctaccattaaattttaataccacctttgattaacttccagctgtcatatgtgtacttctgttctctttaagtgcaaaataacctccccaagatgatatttttcattttacagagcatataaggaagtggtgtgacatgacttctgagtttagactttccagctatggtctctacactactgatttgcagctgtggagccttgggcaaataactaccctggtattgttttattgtcagtaaaagggaagtgataatgacatttatctcaccatcacattatgatgattaaatgagataatttatgtaagggattcagaatgcttcacacatagtcttcacacataacaatcaatacacataatacttcacacacaacaatcaatacactcaaactttttttaaactaacaaatactgtcatgtgagttgccttttttaaaaactgaaagcacttagtggcagatcacagattaaatattctttgggaatgctggaggtgagtatgcagactgaaagggtggaaataaagtattattttactggcattggctcttaaagcagaatatagagggatatatggtctgcagatttttttgaaagcaaggataatgcattttcaattacaaagcccaagcatcttgccacagtgtttgacacatataagacacttaataattgcagaattcattagtaaatgagtgggtagtgacataaaaattcaggcaccatgcttctgcttccagaggagagacctcttctgccagcctatctccccacccaagcagggatggtaggtcgctgtccacggttctgaactctcaccaggctggaatctgctcatctttgtcagactgctttttttttttctttctccctctctcctcaaaaaaagaaaaagaaaaaagaaaaaagagagaaagaaagaaagaaagaaagaaagaaagaaagaaagaaagaaagaaagaaaaaataataataattcttcatgcagtctactttcaaggcacggagacaaatgcccccatatatttcccaaatgggctaattctcactatccggaattcttttaatgttctgaagtttcatgmttttccctgctgagcctggaagctctctacataagaatgctggatttatttcatctgggcctagatttttaatgtgttgaccacctagagtccttggcctttgtttcacagaacagatctcacggccacatctccttctttaagagtaggcaggtctgtcggcggttcctttttcgaatccctagagtcggtgggactacgtagctctggctcccgcagccgcccagcccagacagctcagagagctgctgatctgctctgcgttctctctttttcctccctcttctccccgccactcagcaaaaagacccgccagactcctgggcagttggagtcccttcaagaaccctgggagcactgtaatgtaactcctttagctcccactccgcaccctcagatgtcgcacagcctgggtgctgggatcaacacgggaagattcactagattgactctgtgcggatgaacgggcaccctttccttcccctcctccatctccacttatctaccctttgtgcagttcttagaccgaggtttatactgaaatagcttctaaacatcaaatattaaaagtggataaaaaatccccgcggggtatgtgtgtgtttgtgtttgttatgtgtgtgttcatccgcgcttgtgcaaaatctcctaacgtcacagttcccaatcgggacaagcgcgccgagaaatcctggatcttcccagggattccctctacgctccctcctcttcttcaataaccccaaagaggtaggtttgagctttcgcaaaccaccactgcagcgatggaagcagacaaatctgttgagattttgtctttcccctttcgttcccagccctcttaggcaagcagttctgagcacagggttttcttcaattcccctgcrtccacactgcaaccgggtgcaagtctttcctaggttatagacagcccgcctccccacgagaccttctgcggactggctgcccctggcctcggcctgggtgggtgggtggtgctcgcgccgcccctactttcccctggggccctggagagccgcgcgctgggtgtgtgtgtgtgtgcgcgcgcgggtttggtggggaaatctccttcagtggaagctgctgagtgtcgttggcggaaagtatcctggagcccagcaaaagcctccaaagcactagagcttccctaaagaaaagcagaataaaagaaagacaagaagggaagcccgttcctctaaagcccgggtttccaatagtcccggatcctcctggagttgggcgaaggcgcagttggcagcagccgctgctggcacccggacttggaaaggcggtgttcccccttttcgggaggagggaggcagggacttgcaggcaagagttgcacctggtctaggaacctgcagagaaaagaactctggggtaagtagtgttctggcactggmacggaaaggggtaaagggtggggggcatgagagggacgaaatggagagggcagggaatgaattatgcaaaaaaaatctccaatatttcgcagcggagggagagcacagcacagcactcccaggatgagtcctgcctgggtctcccgcgccgaacccgcagcacgaagttctttttaagaagagaaactcgaaaatcctggagggtaacagaggcagccagggcggggcggagtgcggaggcggctgccagggactggggccgaggcggcggccaaggtggcctgaagctgtgacacccagcctcctcctcctcctcctcatggccgcgctcagcctcacctccccgcccgggcctcctgcctccgcccccgggtgccgggctgcggagctgacgctgggacgcccggcggcggcgagracgctcacctggccaagcctccttctcctcctccccctcccgcccccacctgtcctcctcctctctgagttgggaagcgtagggatccgtaggcgaggaaataacgacccctgcagttgtattgcggaaaatctcgacagcggcgctagttgcgggcgatggaagccaggcaactgggggttctggggagttcaggaaaatagcagaggagcaggaagggcgcgcgcgacctggagagtctgtgtgcccccaccgcgccccagtccccggggcccagcccttcccctcggcgccctggacgcactgccggaacccggctgagaggctgcaggctgcgcgcggacctggggagcagggagggtcggcggaggctgccggcggctggcggtttcgggcaataatccctgcctctcyttctctgtgtgtctgctgtgtctgctccttccccgccccccggaagcaggagaagaactgccccggagcgcagcagccaccctccgaccatgccccggtgaggggggcggacttcgagggcaacttgccgcggactgcctgggcttagccagcgagctacgcgctcccgggagcccggaattgcacggcgcagcccggcggggggctatcgtctatgtcttcttggggcgccagacgaatcggggtctcgtttttgctggaagagcccagtgttggtggcttcaggtggctgctgccgccgccgccgccgccgccgctgctagtgcggtttccgccgctggtgcgaagagaagagacacgcgagcggggagacctccaaggcagcgaggcatcggacatgtgtcagcacatctggggcgcacatccgtcgagcccgaggggagatttgccggaacaattcaaactgcgatattgatcttgggggtgactgtccctggccggctgtcgggtgggagtgcgagtgtgcactcgctcggaagtgtgtgcgagtgtgtatgtgtgtgtgccgtgtcgggctccccccttccccccgttttcccgtcgagtgatgcacttggaatgagaatcagaggatggraatagtctgggaggtgctttttcttcttcaagccaatttcatcgtctgcatatcaggtacgggacgcgccgaagtcactggctgatttggattatgttgtgatgtctggggtgtatggggttttattgtatatagccgcggggcagagagagrggtggcgagaccctttgagttctgcgggtttgccgccttcagaatcaaaaatcttctcagcccaagggtgtgtgaatgtgtgtgttttgsggggggggkkggttaggatctgtgtgcagtcctagaagggtgaaggaaaaagtggtgggggatgagaaagaagaggcagatgggtgttgattttcaactgctttcctggctgagaactctggcgccgaaatccgagccttggcaacaaccacccccatcccctggctttcaaagttcccagactcggtggttcctggctggcaaaatggacgcggggccctgcccgggtatctaaccactttcaagagactgcgggaggatgcgggactggagagtaccagcagggatcagagatatgtcctccatgccttacccaaacacatcaggactgattgtgatgctttgaaacctgctgacacaccctcctctacccccccaattttcttgttaaagcactacagtgtcacaaataccactttctttacatcacggtgttttttaattcccagtagcaaggatgtgctggctcagacctctcagtctacttgggcctgtctgtgcttttaagagcaaacgggatttcagggtgttgaggtgaaagaggttgggcttgtggacacctgtgcctgagtgtgttaggacgagttctggtttttgagcactgtctttgttgatgcagggaattggggttgggaggaagctgggagggaaaggggaaagcccctggaccagcagtattccccagttcagtggctcctcccattgaaggcacccaccccatttcccttcacacctgccacttaagcacccaaggaaaagcccatttgtagtgctcccttctgcctgcattcttctgcagaagtggggactcggccaacttcccatgaagtcatcagaagaggagagcaggatattgcccctttgagcagccacatttaagcagcactggggtggagagacatgtttcctgcctcttccttcagccctgtcaatcccctccctttaagccagacctgattctggataggagaaaacaaccctagttctgccctcaccctggactctgttccaaatcccagtctggcttccaattttctcctcatagggaaggaatgggactcttatccgaaatcattctgtgtggggcttggctaccctattaagaaatttgtctctgtgatacatcagtgagatgtgttgtgtacctggcagacaagaaawtgtgccctggggtcaccccaactcctctagtgggacttctattattccattctgcatctaggagtgaaaattctcaagtgacttgtaaaggtttatatcagtcatatgtccagatatgaagtgggtggcatctcacaaggccatattttacatctttctcttctacatgtctatttcaaactctctctcttgttccagaatatttgactagttataaaatagcctttccttacttctccccagtgtcattaataattttcaaatcagacaagccatctgagtacctttaagatttataaagggttaacattgattaaggctctggatttcctccagcatcctctctgtccccagcccttaccctgaatttcgccaggcaatcaccgaggggaacaggctgagaaagggtctgatcttagcctccaaaaaaagcattagtgggatacctgtcacagctatatttgatttggtgtatcagcaactaaattattcaaatggaagcattaggagggggatttccaactcaggaggagtgctatggagtacatggcctttcatatgtatttactaaataatcattattgctatgtaatgagaggataaaagtgtaagcaaaattgctagctattagctaaacacagaaaactaggttagcgttccaaatgcctagttaggatctgcattaatttgcactttatgaagacatttaggcagggatgcaacatcatatactctttattttacacatccataaactttaaaaggccatttcttctccatggtcagggtggcctcatcctcctgtaagcagagccactcattcagtaatgcccatgtatgtgagaattattattagtaatatgattatgactcacaattgctacagtttgggagactcagactccattctttttccatctggcagccttaggatgtataggaaatgcaatgcactaaggttgaatatttgtggctttgagagagtttagtggatctttcatttctgtctccatgatttgcarttttaatttactcatgactgagctctattgaaaggaacataaccctgtgatcatagaatctactaaatcttaaattaaaaawattaaaaacaaagcacctctttakcatcttggaatgaattttcctgaccactaagtgggtgctaatccttacagagttaccagacattgatacttgaagcattgatagagttggcttcattattgagaaacaccaggctggaaaaggctagtaaaagtctgtagtctaaacactttacagaaggaaaatgttggtagtagctttgtcatgtggaagatatattgactgaatttcatttggtggcatttgctttcaggaaaacattggcgctttgkagcttagtgttttgttaaccaaaggttccaacacttcctctaacccacccccaaatttctccttgggcctatttggatatattgcttaaagtacagacacctgggcttggcatatttggtggttctgcactaataatttggttttgatgaaactgttggaaaatgagactgtttggccaggcttagctagatgctgggtcagtagcatgtatgtcttttatttgtgagatcacatcagctttggctacttaatgcaacatagctaggctaaagggcatgatttgggagttcctctggctttccgttaaactcagatctcacttttctgaaaatgtaaggcatscagggtctgtgaagagatcagagacagaaagagagagggagagagagagaaccagaatgatttttccgtgtactgcaagagcaccattcccttcctaccaaagcagctcagatcagcaagaatgtatgcttagcagcacgaggagagaaatttcttggtcaaacgagagctgcctgatttaatttttacaatgcatcctacttcctccttatgtaactttacttctttgtcagtttattcataataataacatcaataaccatttgaattatgtggyattttcacacattgtacatatattgcacatatttaattcatctattcttagaatttgtgggataatcttatagatatagcaaccaaagcccacagagcttcagactagaggtttcacatccaggtctacctgagtcaaaattcagtatatcatttatgttttggttcaagattcctttcaaatatttttatttaatattttttattttgatgtctctgaaagaataaattaggttaaatgaattgaagtcttagagaatttggaagtaaaagttttagatgattacaatttagagctagaattaaggtagcatttgagttgtacattaccctgtcaatcaaacagatgaggctattacccaaatgcctctagcatcttaggatcagcaatctctacaagcaaggaatatttcctacactgttttcctaatcttaacattaaaatggcataacttcagtttccttatgtgtagaaaagagataacagtacacgtgtcacatgtttgttctatcaactaaatgagatattatgtccaatgattttcacacagcacagtttctaccacatagtaagcatgcaataatgtcattatttcctacaaatctgacattgtataggcttggttcatggtggagtagagcttttacctttttccatatcaacttgtttaaaagcaaaaagaaaaccatcatcagcaagcacatctataacattgagcacaaaccctattttccaggaagccttggctaaataattttgaaaagtctcttaattttccttctcatacaaatgagactggtagcattaagctttggtgcatagtcataactgtaacccactttatccctatgagtccaatatggagttgaggcttggaaagtttactaaactacctggaaaccatgtagtacttattacccaggggatcagcgaatttttctttcagttgtatattacaatgcagtatagacccaactttaaagtgcctcaacactggcaaacgacatatgctttcaatatggcttgaaatagaatgtcccatcaaataaaaagccccacccttacaatgactatttatctgatgatctcattagcaatgtggtttctttaaatccagtttcccatgtgatgtcatatagcccagttactgacagataaccatcatcatagataaaactctccagatagtgagtcaagaaagtcttttggagttgtatgaaatcccaagggaaaaaataaatgttgatgtgaatacccagtcccttggctggggagaggggtttgattactagcctaagtcagtaactaatgtctcagtttatcaccttaattaagcattacatacttgggactaaggtcaaaaagagatctaggtatcataaatgtgtatgatagcaagccattatagaaagagtatggaaatcagaagacctatccttcaacgtgactctaccttcattacctttataaatttgggcagttttctttacctctcagaatctcaatcctcatctgtaaaataaaaattatatttgctttgcctatttcaaagcattgctgagggaaacttcagagagtgattcttgaataaatattttttgcattatgcaagtgtaaagcatctgtgtcattactatatatgatccatacttaagatatagttatagaagcaaagttgagatacatacmcatagtttagaatgatataaagtaatatgagtaatgtttatttgttaagatattattataaatgcaaagttgtaatgctaaaatgcattgtgatataaaggaataggaataatgtctaattgtttaataattggcataaattgtatagaagggagaagtttagacatgaaagaaaaggagtatattagattgattttggaggtttggatgaaagagacagaggggacctcatcatcaaaaaggaggaatagaaacaagaggatgtacgctaaagaatgtcccaactgaaacaaaaaattcactttgggagatactggaaagttgggatgagcccacttagggagctattgaattgagagaatatgaagtgtcctaatatggttattcactttgtgactttcgtttttgtattaaggatctttgcaacggttcaatggattctttgttaaaatttgtttgaaattctaacatttctttggattttaaatttctgttgcatgtctacaactagcactgtactttatatagtttgtagcctgtttgagattgtagacagttgagttggaattttttcgtagggggtgaactggagggggctggaggtagggtctcagcttgctcatctgtaaaacagagatgataattacctctcaaggttgttgtttctacaaggtaattataaggataaaaaaacaccatttgtaaaatggctaatgtggtatctggaatacagtagccattggccaatgcatacacatcatatgagagtaagcctgggttttggagcccagataggcagacgtgtgaattctaactttgggattcactctctgtttggtcttggataagtaatttaagttctgtgtgccttaactcctcatctgtaaaatgtgaggtatagaaaatgtacataagaatctgccatactgcctgacatgtattaatcattcagtaaattgaagttgctcccataaaattatcatcatcatcatcactgacatcaataacaatacttgttgacactttggatcagtttttgtaaatgccaattaattatttaatcatttattctatgttcaacaaagacgtatcgacagcaaactctatgccaggcactggaatcacagaaatgaacaatatttggtccttagtatttaacaagagagtacatgttgtaaaatagaaatgtgtataaagtatactggaagtataaaggaagagcaattaactctgtcgtttgtagatacaagtggagaagggaaaakgtttatagaaaacatttgacctagacctagaagaacacatgagatttcaaaagaacagggagaaagaagacatatcatgtggcaagaatagtatgttcatagacaagaagatatttaaaaaacaaaatatcaaagtatggtggattgggcatatggagtggataggttagactaaacgactggatataggggttacaaaaataaccttaggccagtgtgaaggggattgtaaaccacaataagattagaccttaccttttatttatgaggagctagctaatggggagctaaggaaaatgacgtaatcaggtttgtgtgcaacttaatatttttactttgattgtaataagaaattacttagaaacccaactccttgtcttctttttctgtcaacatttattcttgatcacaaaacacattaaaaaaaatcctgacctaatagatcaatttgcccattatgggacattctaagtgatacacttttttaaaaattcattttttataaatctctcgtgaccctcatttatcctgatctttgagatttggtattttcaggttaagcaaatacaaatatcttcaattttgtacttgaataataataacaatgtctttagcattagatgaaggctaagagaaatgaatcatctgtacatgcattggtgtcatgaagattaattatgggttaagcaatagatacactatttgacataaaacagatgctcaaagtactacaaagcattgtgtagcagttttatcttactacattctgttcaactcttatttccaatagagtacacattcacttaacagaatatacccatggttaactaaatgatatatccattttacccactctatggttcagttactataaaatgagtgtagagacctaaatgaaatggttttcattgtccacttaatcattcaacatttattgaggatacattatacatcaggtactcagaatccaaccagaataagtaagacagtgaccttttcctccaaaaattcttcatctagtaaaagactgatttttaaaatattggtagtcacagcagaatgtgataggcattgtaataaaaaggtatagaaagtgtttgaggagaagagagaagggacatctgactcatcctgaaagtaggaggggtagagaaggagagtaagtagcgttaatagaggatgcttagggtgagtctccaaggatgttaaagagttgtcgtggaagattttggctacttaaccaagagggttgtgatgagagatggatgatcatatgaaacagcatttgcaaaggaagggagattagatgagacataggacatgattaattcaggagacggtcaaaaagtgaacatagtcacaactaaagagtgtagtgtgatggatgaggttgagatggaagagtatttaaggtatataatttcaataacagtaatcccttgcatataataatgtcagtaaaaatcacccattttccctctgtgcatgaaaggcatcttttaaaggcccaaggaagtatgcagtttgcatccttcattaggaagagaccagtcagtattaaagctttggctcttgttcagctatgctctacttggcccagaccactgatcattttccactgttgtccctggttccagatggcttcccagaagctttggaataacccagatatagattacagagtttatatcatcttgttacttagtttattgtcacatatttacaccctaggaaaaaaaagccaggaccctgttgaccatggattttacggtatatctattatcatcttactcattgattagtgaaggttttctgtaacttttttgcagtttttatttcatgtaaccttaaacagacctttaaaggatttccagcagtcaggggttggggtgggaaggtttgggtggtgacaaatgatctaggatcacttttataacaaagccacaattgctgtttattagcaagattgggctggtaacgggatagccagtgtggggtttgattacatttgcattactgggccatcaggatggcagtggagagattatcaaaggttatgaaggacacagcatacaaatgcctttgcctactgatctgggagaagtggtaattttgtcacagtaaatgaagaattaatctttaactttgtccaatacttcatgcctggtggctgaaggggctggcagtaggaaatgaggcctgtgactttcaggtgagttttccagagccaagtcttgctggctttgcaacacatttggcagcaatgccagagttggaataaacagatttactgaaggatgtgagtcaacatattctctttccgctcccctctctctcactacacacacagctaccttttagcctcaaggaaaacaattctgatagctgcaattattgagggagcataggcctgtcctccaacacaaggttagaataataataaatacctcagaggattcttgaaataaacaataaagtaatatatatggaagatttttttcccagtgttaaatgtatttgttaatttattgcacaaatgctaacaaatgcctcctatgaggtgggcactgggccaggcataagataaaatgtagtaraaaaaacagcaatggtctttgccctataaaatgtgtgtagtgacacacaaatgtgtgagtgttttttttcccattacccaacccagtgcctggcatttagaaaatgctcaataatgaatgactgaattaatacataaatgaataataaggagcgatggagagtggcttttctgcattcagggcagactgagggacaagatctgaggccatgagggaggggagatgaagaagacacctctaccagctgttgtcttgcttctactgcatgtaggtttttgagtgtgcagagtcacagagaatgggaaccttcccaatgagcaatatgtttgatagttttctagtcctgctctgactcatatttccatttgacaaatcatccttatttggggcacttatagttgtttaaaatgtatttcggcccttttgtatttatgacaccataccaaaggcttgaactaggacaattaaagatcagtggatacattgtcattcttttctccatgtcatctctgttcctacttgaggagattgtttggaacatgtacgctatttcttaccaagttcctacttgggagaaaacaacactttagaaagctcactgttcccttgttagtgtgttgaactagagtgctttagggagaatagcctaccccactttttagtcttgatgcagagcaatacaggaaattactgtggtctctatggtgttttcagtcttgtgtcagaaaacattacttcccctctggccttttgtaacagaattgtggtgtagctgactagttcttaccagagaagagctggcagcctaggaattgaaagaacagagtggatttgctgtccttggctgtgaattcaccctgtaatcacctggttaatctttacaactgtgaggagatggtcaattggataatttgttgttgtttgcttgtaatcttaattacagaaaaaaataaaaaggggttatagaaaaaaaaggggccctattgttaatttctcagtggatgtttggggattttaaagtgagacatcggtgagtatcaagtttctattgtatgacctgggtgtgatagaaatatgtcacttgatgtctaagtcttgtaatgcaccataatgatactggctcttaagttacagtgactcaaacccctgtagagtggaatataaagtagtgaagtcattatgttttatttctgtaacaagtttcattcctgtttttctactgtggtgaagttccttgtggccttttagtttgttttagcactgagttttattggttgaatgagagccacrtgcaattttaagtgtataagttagtgcaggctttttttttttttttaaatctgcttttagaactgcttaaattagagcttgactaagccaggtaaaggcatataatgtgccacatccaaagacaagttgaacaacttcatgaatgagagttgtgtttatgccttggttgtttaggccaattacgtatccaactcagatgttctttcttgatcagtgctccttgcaagacagggactgtatatgcaaagtgttttagtgtcacagacatgagtgaagcctggaatcagagtgtattttatgccaaatatgataaaatattatgaaaaaaattaggaaaaaaattattccccatagaccaaatttttgtttactaaattttgaaactgtaacttttccaatttgtactgtaaaaagaaactttatatcttaaatrtttctccatgttgcttcctagttgtgtcagttcagcatatcctggaccctgacacatacaccccacaatctcagtgacataacacaatggaggcttacttctttgcattaattgtccaatagatgtcaatgtatgtgtgtgggcatgtaggtgcttggtgagaggaaagagataaaagaaaaaaaattctgtatttagtggtgacttgggagtcacaaggttgatgggggctgtgctacctcctatggtttccaaagttttcctgggcatcaacatcaccagatggggaaaaaaagtgtagaggaagaccatgggaggggtttttgtgggccaagaagaaaagctgtgggcatcctttctggtcagtcacattgccacatcttatttttatttttatttttttatatttatttatttatttatttatttattttgagacggagtctcgctctgtcggtgggatctcggctcactgcaagctccgcctcctgggttcacgccattctcctgcctcagcctcccgagtagctgggactacaggcgcccgccaccacggccggctgattttttgtatttttagtagaggcggggtttcactgtgttagccaggatggtctctatctcctgacctcatgatccgcccgcctcrgcctcccaaagtgctgggattacaggcgtgagccaccgcgcccggcctatttttatttttttaccatggtgtttcaccacattggtcaggctggtctaaaactcccaacctcaagtgatcctcctgccttggcctcccaaagtggtgggattacaggcgtgaaccaaagtgcccagccakccacatcttattttttttttattatcatactttaagttctagggtacatgtgcacaacatgcaggttkgttacatatgtatacatgtgccatgttggtgtgttgcacctgttaacatcttattttaaagcagttagagagttgtaggctagccttgtagccaggagcaaagggaaaatggtttgcgaacaattagctagtatctgctacttcaatatgcattatttttttcttatatttccatagtagtttattcatgtaaaatagcattatttatatttaactttcccttgtttttaagcatatatgttgtttctagtttatgacattttttggcatttgtttttatccaagtagatatttatcgaatttttttwaaaaataatctcaatattgtgattattgggtcaaacagtatgaagttccttaccattttactgtattatatctgaaagtaatgtataacctgtttatgaggctctagtaatgtgcttgaattccttgagagagtaagcaagtatgtagaatagtgactaatctttcaaacatcctttcagcaatggtttacctcaaaatctattaaacaaacctaaatagctatgggattcaagatgttattttgcataacaagttagatcagagacaggaaactgtggttaagataaacaaataccttttctaggtctagaattttaagccttcttaagtattgttcttggagcacatttttatacattatagggaagatagaattaggtgatttgctcaagagattactaggatggaagttaggacatgttgtgtttagtgttagttttgccactactacttctgtggcatggaggaattaattttactattctggggccagttttctccttttaaacagtttaagcatattggactaagtagtttctagatccctttccaacttaggaactttagtatattaagagacttttacagaaagttgtccaaatttgctgttcatgctaaacttccccagtttttgaaatgttgaggcaacaagatgaaaatataggaagatctttcacgactgtgagtgaacaaaaagtggaaaatgactttctatatgggcaatcatatgataaggcattatgagaaaaataacccaaataacatttgtggaatgattaccttgtcaccctctagtgcaacgctgggaaagagtctaggggtcgtcattgactgctacagatgtattgaagagcattcatcgaaaacattatacgttataccttatcttactatttaacctcaactctgatgtttcttattgtgtgactttaggaagttatttaatatctctaactaagtgtcagtatcctcatttgtaaattggaggcaataacacctatttttggagttaagcgggcttgaaataaaaaaaatggagcctggtgtttggcatatagaatgcacttgataaatggtggcttttgctttcgatatggctgaagctaaaagaataaaagacacgttgagcaaaattaggaaggaatttggcaatatcatgtaaaacatggggattaaatgagccaatgcatgtgaaagtgttcagcacaatgtctgcacatagcacataatcagttaaggttggttgaatctgattcactaggggaaactagaatgtttggrgaatattttaaaggtaatargaagggagataatcatgtcttttcatagcatcatcttcagagacagtttactgggtcttgcccatatgttcctttaataattttttaaaaattaagaaattaatgccccatatttttagtttacaactgcactttaaatttatcaaaacctctaatgtaggcatatggtctcatataatccaataaatattcggccttgacagtagtggcataaatagaaccctggctcaggaatttgcttattattttttcccacttaatacattagtaaattctagatcatttgccagagcaataaagaagtgaggtattattatggcctaatccatttatgataaaagatacactatttaccctgcaatttttgaaactgtcactcatttttactgaaatttggctactctattcccttttcattgttcagacttacctgcttccccaagcactaatttgtgtttgtggtaaccttacccatgtttttttcaacctattctcaacatgaaaacatagctttgatttgtttcatattcacttgagagaaggatttctttaaatgataattaaatgctgagctattcctgagattgcagtatggttccttttcaaatatatctgatctgagcatttcagcaaaaggcataaragggaaaccaacaagaaataggacagatgataaatactgtattgatgttaagtaaagacaagcaaactgtgacctgagtatgtctgtctctagggagcctgctttagagcttttcccagtgtttggtttttttgtgggatttttttcctccaagctcgttggtagaggctggattacaactgagaatgcagagattaatggcctgctgtgactaatccactaaacccctactcctgtttctcttaaattgattgtacttagagaagctgagtgtagacccaccccagccagcctgattttaggtcccagtgatttaatgagatccagtagctttaagtacatggaaccttcatggaacatcatcactttttgcatttgggcattatttcattagttgctgattagttcccactggattattttataacytctctttttttaaaaagaacatttttcacatgattatattttaaaaatttaacactaacataatccaatttaaaataattgggaaaaaagagaaaaaacagatcacttataatcacataaccataatacaactattattaatattctggtttgtttctttctaagcttttacttatataagcattttttacttatttaaaattatatcacattattgtgtgtggccaaaaattcatgtcagataaatatatggtttgtgttcattaaagcaacatcctcctaaaatatagcccaaataatgtgaaaataattatatacatagatggatagatatgtcattgatggaaatcaagatttaatactaaagcagtgcactgggattgtattaaatttgaacaaaatttaaatttacaaatattttattattaatctggtgatcttaaaaaataattcataggaagataaaaggatgacaaatgtaattatagtattggagatctttgaggagagggaacactggagaaacaatttagaaatgatgttaaaagtattttatttaactattaaaatgcagaaatatgtttaaatccactgagatgccatatagcttgagttgagaatgattaagagctgcatttaaacccacactctgcctcttacaagctggttggctttgggtaagttaacttcttatggatctcagttttctaatctgtaaaatggagataaaaataaccccatcagctcctgaggcctgaggaggttgtgaggaatatgagcggtgctgtctctctcaatgtgccctttagatgattccccctcctagggctgcctgcaggggttgtaggcttgggaaagattgtgtaggtgacagtgaatcagaatgaaatggtagattttgtgtagatgcatttgtctgctgtaattttatatatatattaaacttaccataactgtacagttcatttctgttgtaaaacatcattaaaccattttccaagtattttcaaaaaaaataaccccatcagtgattttttataagcattattaaatgacatatgaaagtaaagcatttagtacagtattatcaggcacataataatggcttaataaatgtgatctggtattagcatcaaattcataacatgtgagatgcagccaaccatagtctctttgtaaaggaggaagactatttgagttagctgctttgtaggggatatggtactacaagctcagaaaccttcagtacctgtcactgactcttaaaaatgaagagttcacactgttgaaagtgatgttttaaagtcttccatgatgtgccatagactgacctttccaactttgctccaatttccaactcaggattctgtgaaggcaccttgcagacacttacctgtgcttttgctcatgctgtggtttttaccttattttgacccacctgaatcctacatggcttactcataggttctcacatgttcaaccagaggcttctttgtgaacactgttatgagcagtccagccagcagcagtatctccccataatgccccatcggctcttcttgtccccggtgctgcccatccactggctgcctttctactttcatcaggaaaattcaccatggccaggattcatctagggtatccccatcctactcctaatgcaacatgctcattggttgggttttactctccaatccgtaatgataggtttttccacattctcaccagtagtctctgctgatttaggtttttttctcttccctaaaccaccaagtcccttctagatataacacaactcagaccagagctcagcaaacaacagcctgtggactaaatccagcccacaacctgtttgtttacaacttagaaaacaaagttgtactgggacacagtcatgctcattcattgatgtattgtctagggcttcttttacatcacagcagcagcattgagtagttgcaacagagaccatactgcctgcaaagcctaaaacatgtattctctgcctctttacaaaaaaacatttctgagaaacagttgaatcaaatgcttccaacaggtaggaggataaactgggtacctgaataatgattttttcttcagtaagggattgattgaattttacatgtaatagtcaatttttaaaagctcggaagcttcaagaacctcagaactgtcttgacttttgtggataccttggccattttactaccccaaagtaatgcttcaagcaccttctactgtcagaaaccaaaaacaagaaacctcagtttgtgctggtttgcatttataaagctccctttgctctcagaggagcttagagtagctctggtcccatccaggtaaacattatgggggaaagtcaccctcccctaaggcatggtttgtgctgggatggcagttcggcagggaaggagcaagctttctgagtactcttcttctgccagctctttgaaaacataacccttctctttggggaatgaaggtcagaccatattcagaaataagaacatcacctggagaacaagcaattttaggaatgacaacctgagaaatcaaactttccccctgatgattgagacaggccagactcataacccaggccatgatcagcttctgcacttggtagagcattttctctcaaataacaagctgaatgagctttaccaggctctgagagatgattgttgtcctctctgcacagatggcaaaattgaagtcaagaagcagcggcttaggctggccacagagagagtgggttctggcaaagaccctacagggctcacaggagctggactcccagtcctcttagacatggtatttgcactaagtccctaaagcagatttcataacgctgcgtaacaaagcctctttggaactctagagcaggggctgacaaacagtggcccactgaccaaatccagcctactgccttgtctttgtaaggcccaggggctaagaatggttgttacattttcagatagttggggaaaaaaatcaaaagaggaaataatatatttcatgacacrtgaaaattatatgaaaacaaattttggttcatgaattgtgtttgattgaaaacaaccacactcattcatttatgtactgtctagtatctattttcgatggctacatttacaccgtaggggcaaagttgagtagctgcaacagagcctaaggccggcaaagctcaaattactttctatctgtcccttcccagaaaaatgtttgctaacccttgctctagaagcataatacattaattaatataaacttttattgaagtacattaaacataaaatgcactcattttaattatatggtttgatgagtttggggtaaaaaagayagtcctataaccaccaccgcaactaagatgtggaacatttttatcactccccaaatttctgtatgtttctttgtagtcagtccctctccaatccttgtgcaggcaaccacagatctgatctctgttagtggtaacaacttttaaacaattatttagaaaggatttcagatcactagagaccgtgttgagagaaggtggtggtgggggtgtttgaaaacatgaagttgattttattctttcgtttgataattccttaattcactccaaacacccactccaaacagccacttaactgttcataatattagaacctaacaggcactgtgcaaagtgctgtccatttattatctcattttatctctaaccctatgagggacttcttatccatctctgattctattgagaggagacaggcacccaggtaacactgaggagcacacagctgttaagatgtaagctaagatttgaatgtggacctgtctgaatccagagtctgagctcagccaccatatcacatacttattcaatcttcactacaagtctgtttgggagtatattatcaacattttgtagaaaaaggaagctcagagaggttaagtaactagttcaagtcacccagctactaactgctagagttaggatttgaaccaagctctccaaactgcaagcaaaagacaccgaacagagagggatggaaatgcattatttcgaaaaaaaaaaaaaaatcaccttgtcttacagatggataaagtaagagccatatgtgagcaagttctagataatgcagaggcgaatgaggcagtaggcaaaaagcagttttaagccagatataattttgctttctaaactaatggatatccaagactatttaatttaatgtaaacaactaaaggccataaagtgctttgaaaatcactgaggggtgcatccatgctgaccagaatcagtaatcaaaatctctcttgctgttccttcacaaacagaattctatctgaattggtctgtcatattgagaagagatgaagatcaaagtctcagaacagacctccataggatattctctttctctcctccccctacaccgggtattataaagaacagcgcaatttaccaactcctagtttgaatgattgcattccatttcttcagggccttttttactaagtacttggcacctaaatggtgccccaaatgattgtctgctgttccaattttctaggagcactccgtcagcctccctgcaagcgcttcttacaacctagcacaggaggctgtgtccactgggttccttagttataaataatgaaaccttcaggactactataagcagaaaaaattttttattaaagcacttgaggtgctcacagagtctgagggtaggccaaaaaatagtaattggaaattgtacttacaagggtatattatggcattgctctaaaaaaagactcctgccactgctgtgtagaaacagccagatctcatcactggtgtggactgagctctatacaccattggtatccagaaagctggacactgctgctaccaacctcaccagaagatggatttgatatcaaacctgcttgctcatgctgttcactttagaaccataatctcaggcatctgaatgactaagttcagtcacatgcctgcatcctgtccaaagtaaagtacaggtttctacctgggtgggactggatacaaaaggcaggaaatactccaaatatagtgagttggctgaagaatagcctcccaaagatgtttgtgtcctaattctaatgccaggaacctatgaatatgtttattttacatggtaaaagggatttagcattcatgattaargatcttgagattgggagattatcctagattatctgggtgggccaaatgtaatcacaaaagtcattataaaagaggggcagaatgatcagagtcagaaaaagaagatgtgagaacagaagctgaggttggattgatgtgctttgaagaggaaggaagggagttaccagaaatgcaaaagatccccagtagctggaaaagacaaggaaattaattcttccctggagcctcaagaaagaacacatgcctgctgacaccttgattttagccccttaagattcatttcagatttctgagctccagaactgtaagataatacatttgtgttgttttaagctactaaatgtgtagtaatttgttacagcagcaatgggaaactgatgcacataggataggtattcagaatgtgatgacagtccagggagcatgacaaatgtccaccacagctgtggtgaaggaaagctagaaaaattattaatatttcccgcatccagtgctctctactttttgatagcattctaatagattcctaaagctaggttgggtaaacaagctaagtaaaattgcttgtgattgttcagattgttcacccactttattcaccccgtgatttattcaacaaatgttccatttattaaataaatatttactggagctgagtgccaagcactgtgaaagatattatagcttctggagctgagtgccaagcactgtgaaagatattatagcttcaaaggagaataagagagtaagactcaaagctgacagtcaagaagttcatasataccaggcttatatttaactgattttcagttgtctcttcatatcaaatcctacccaaatttatattgtttgttttgaacaatgggagttaggatgtcaagatgatttcacaacaatttatgcataaaagcattatgctgaaatgaatattttcacttgaatatctaacagtagtcaatatttattgagtgattcctgtgtgttacagataatagtaatattttatattatttatttcatttaattgtcacatcaaccctggagaaatggatagttgttctccccattctgcagatgaggaagctgaggcttaggaaatatgaccaaattcatactgctaggtaagagagctgggatttgaatttcctgttatttgacttttgggtccatacacttttgccaccctacctccctgtgtgccaagctctggcctagggactcacaagtgtgtgtgaaaaaaaaaaaatccccacatccgtaaacttcaaaatttaataagtattataaaatgagctatagaaatacagaagaagaatttatatagatttccaagttgactaatttttacagggaaaaaattcctcattttgatattaattaccagttcatttagtaaaagatcacattattttacaactgaggtattttccaaagcaactccatgttgctttcactaatctaggtgcaaaatttattctcttagattatttccatttcaaaatcgtgtctcacaaggaatatacatgaaatatactctcttctgtcacctccttccttccatccataacagtgtgaatactttggccagtgatattgtttatgttaatacgtgttgtagcctcttgccagaaattattaggctcagaaaggggggcagagggaactctccaggaccctatttctagctggatgtctcccttctgcaaagctcatcaagcacccacacaaaaaagctgaagctggctggactgtgagcaagacacacagataccacccctcactcccagcttgagtagttagggtgcgtaggattccttgaccgtgaagctagggrccatgtcttacacaaatagcacacaagtgttttgctccttaaattctgggagctgctgttggctgaattacctctcagccgtcctgttgacagatggtgtaacttgctcattaaatcaggatcctccccattccgagggccccaggcatgttaggagacagacttggtggtgttttctaatgctaatggtctgcagctccagagcgaagataaatattctactttattgtgcaaccactaacttcagccttactgggtctgctcccttcattttgacagggcacatttagaaaagtgaaatgaagtgcttttaggcatccagttcctccatccgtcactttctcttatattctgccagcctcgtctttttctctgagacttgtctccacacagtgctttatatcagtgacatacagtatcctgaactaaaaagagaccttcctagttcagagttcaggacttaactttggttttaagcagtattatgcaaggcttatttatttggagagcttattggaggaaacaatagcagcctatgcaaagaggggacctgatataaagtcagtgtggctccagcacagataataagcatgattattaaacagccatgtttaacaacttggatgtgtatgctaagagcaatggggaagccaggagagggccttagggtgggggtttcacatgatcgtagttatgctttaagaagacccctccagctacagagtggagaattgagcagtaatgagaagcagagagggagacaagtatcaactgaagaatgacaagattcataaatttgggaaaacagctttatttctcataaagtgttgcagcctgcagggtgcccattcccacaggctaggaagcatagcctcttgccagaagctagaaacagacacttcaagggagaggtaaagggaataggaacgtgcgctgagcaaggtggccaaatatacatatttaataagctataggaggagtcatgaatattcatgaaaggagaaacgtggtcctgtgcaattgaacttcatgcccatttgtgggtcccatgtacaaaaaaaatggtagcattagcatgatccaagggtggagttttgagctctctgatgtcaaaaggtgaagcagaggacacaaaagcctttactgcacattctccatagactggccagaaccactgcatggtcagtggtcttttctcaggcaaaaaaaggaggggcagcatcaggtggtttgttggtatcaaaagtggagtctttccaaagagctagtttctgtttatcccttagggaggaaagcctaacatggttagcgagggagggatatactgaggcatgtctgacctctcatcctgtcatggctgagaactcaatttttaaggttaatctggggtccccttggccaatagagggtccattcagttggggggcttaggattccatttttatttctcacaggcgacctcaggagggcagtcaggaggctctggtggcagtctgggttggagatgcaggtaacctgttgaaggtgatggcacacatggagagcaatggccagcatcaggagccgttcaggatgtggattcacagagcctgatgaactgtgtatggtgggggtgagggagaatggtgagtcagaaggagcccagggttctggctcatgcatggggtggaggatggcagtgrcatccatggtgccagggcacagtgraagaggcagctgtcatgcataacctgagctctgctttgagtcacacagagaattgcaaaatactgtgaagggaagaggcagatgtgcagttgtaggaggggagagaaaaagaaataataacctaagaaagagaagatgattctttctcccagagagtatgccagggcataagaacaaacttactattattattatttttaactaatattggcagaaccactattactagctgctggtattgattgtttagttcatgtttaaactttacaatagccttcaattcttaccgaaatcatgtggrtaggcattatttatcatgcctatagaggtgaacagactgagactcagtgatattaaataatttagttaaagacagaaagcttgtgggtggatgagctaggctttgaacccaagtttggcactagaaagtacactcataactcttaaagaaaaccatcatctcccaagggacaaataaataggtacaaggttacaataagttaagaataaaatactgagtaacaaagaagctgatgggaggttattttaggattatttcttgaagaagttgaggtttaggattattttctggagaacttgaaacattttgttttraatgggtctatatatgccaaatctttgaatgtgagcacattagttcgaagtagggaagaaatgagattaataacgtatagagtgaagatggcactgggggaacagctctttgaaacattctgctttacagccttttattatgctaccttgccagtggatgaaagctgcaatgcttagcttggctcacatcaccagcatgatatgctaagacacctttatagatctcacttcctgcctcccctcgcatgcaccctgtacagtcataaagcatcttccctccttggttccttcttcattcattaatcttctattcattaagtgaccattaattgaccattagctaatatgtgccaggaactttactaagtcctggggatataaggataaatatcctcaagaaaatgatgagtggctataatatccagagtcacaattcattacacaatattttgaaatatgctattacaaacattgtatctattaaaacagaggccagaagagggtatggctttgtctaaaggaggtgaactttgagctagaattaagaacaagtaaaaatttgtcaaatgcatagagcagtcggaaaaatggaaaacagtgttctgtaaatgttgacatgagaattgagcagtttctgatatgcaactgtttttttkttcttgttaacactttttgctttgctctccccaaatcctgaagcctcttcttccagtctcctgttttctgtttccttccacctcttcrctgactttccagattaaactctgcattgcggatctctgacagtttctctcctgctttgctaaccactttaaaaaatagacatttaaaggccttctgtgtgtctcctgctatgttatggctctcctgctgtgtgaattgaagctccctgcccagaggacggatgccccaccgctggggcgctggaggctccaaggcttaccttagaggtttgcaccatgggctgtgatgaatggcagcttggctttcgttccccaaggtcagtcacctgttccatgcctgatttcaccaaagggcatggtaccagattgcttgctcaccaagaaggtgaggcccagacagggcagtgaagcagctccatgcaacatggattaggtccagcccaactcccagcttttccttacctttggagtcatataatccttatctgcatactcagcctgcccatggtcctctgcgctactcctgagaagaggtagcactgatttaagccctgtaattccaccccatatattaggctctgctccaaggtacccttgctgttgtctcactgtggtcctgtgcctcggttgagccacgagatgtcacctgtgtctggaccaagtccccagtttgtaccccagtcctgatgagggccctctcttctgtacctggtacatgcatttctattgtgttaacctatacaaggaccttggaatctctaggcttagggccccaaatcctccctaaatttgtttctagaactgcctataagctaacttcactaaaaccaagtgtgctcagatggccagagcctgaggaaagatgctgaattctgcatgttcactgtgccttcattccctgttgctgtgccccacatataagtcagaaacccagaagtcagatattggtcttcattctaattattcagaataatatagcagttaacaggtacagcacacctttctcctttactgtgcttagtactttagaagaattgactcacatagctcacaacagttccatgagtagcactctgtggcactgggattccagtttaggcagtcctctttcaaagtccattttcttagccccccatgtgctttactgtctgccacatctggaccatatcctgttgttgtcatgctcagtgcctctccagtcaaaccatctctcttgcagcgtcttcctctgagtctgcctctccattgcttccacagctcttggggacaagctgttttaatttttttaatttaaaaataaaaatagtatttctttttttattattattatactttaagttttagggtacatgtacataatgtgccctatgtatacatgtatacatgtgctatgtatacatgtgctatgctggtgtgctgtacccattaactcatcatttagcattaggtatatctcctaatgctatccctccccctttcccccaccccacaacagtccccagaatgtgatgttccccttcctgtgtccatgtgttctcattkttcaattcccatctatgagtgagaacatgcagtgtttggttttttgtcctagctatagtttactgagaatgatgatttccaatttcatccatatccctacaaaggacatgaactcatcattttttatggctgcatagtatttcatggtgtatatgtgccacattttcttgagagctgatctatttctagttcaccaatacacatacaatatagtctattttgataaactaaatccagaaactgatttaagttaaaagaatgaaagttacccagtttctgactccattaaagtcagaaaattctgactacctattttagtactgaaagctctctacaaaattaaatgctctctatcttctgtttttgtgttaaactccacctggacttctttattaattataaaacaaataaaccacttgcaatgagctataatgttagtcacatggaaaacatgttaggcaaaaatactttctgcatatagttgtaattcagtaattgtttcactatcactcagaagagaattattttatatrctggttgcatttagtccaaaatttaaatcattttccctcattagagaatagtaaaatgtaagagaaatataaatttcatgtttttaatttgttcaaaattttaaaacattaaattttgtaacactgttgccatgctctgttgacagatatattagaagagggtggaacaaactcataaagtatgaggcctccttggttcaaagaaagtagagacagaacactcaaatatatattatttccatttatttgtttttttaaaggggaactttggggtaatgccaaacaataatatttatgtttatagtctaaaaaaaaataaaataaaaataaatatagtatatatttatcatatgtaatattgtgttttgatttatgtatacattgtgggatagataaatcaagctaattatacatatgyattacctcacattcttatttttaaaaaacacttagaatctactcctttagcaattttcgagtatacaatacatagttattcactatagtcaccatggtgtacaatagatctcttgaactgattcctgctgtctaactgaaatttatatcctttggtggtgtgtgcctgttgtcacagctactcaggaggctgaggtggaaggatcacttgagcccaagagtctgaggctttagtgaactatgatagtgccactgaactccagcctgggcaacagggcaagaccccatctcaaaaaaaaagaaagaaagaagaaaaaaagacatgtatatcctttgaccgccatctccccaaccctgcaccatctagtcgctagtaaccaccattctattctctgcttctatgagttcaactttattacgttccacatataagtgagataatgcgatatttgtctttttctgacttatttcaattaatgtagtgttctctaggtttatacatggtgttgcaaatgacagagtttccttctattttaaggctggatagtattctattygtgtgtataccacatttctttattcattcatcaattgatggacatttagatggattccatgttttagctactgtgaacagtgctgcagtaaacatgagaatgtagatatctcttcaacctctgatcccatatactctggatatacacctagaagtgggattgctgggtcatatgttagtactattttaaattttttgaggaaccaccatactttttttcttaatggctgtattaatttgcattctcaccaacagtgcacaagggatcccttttctccatatcctcaccaacacttgttatctttcatctttttattaagagacattctaacatgaataaggtgatatctcattgkggtttaaatttttatttcatttcactaatgattartgatgttgagcattttttcttatacctgttagctctttatatgctttcttttgaaaaacgtctattcaggtcctttggctatttttaaagtgagttgttttattactattgagtttcttgtatattttggatattaaccccttatcaaatatctggtttgcatatattttcttccattctactggtgttgtctttattctgttgactgtttccttttctgtgcagaattgtcaacaaatcttgttccagtctgaccccttccctgtgtccaggcctatgttaagtagttgaactatatgcagttgagtcttgagatgatgatagagaggactcaaggacactgaaaagcccatgggcatcaaactgtaaattaggcatctaatgagtacttactttgtacttatttattactatttagtactatgtacgttctcagctgtttttggtactataaaaggatcacatgaaagaaagtctcactggttaagctcttagattctagaaccaggctgccaagattcaaatacctgattcaccacatagtatatccatgtgatcttaagcaagttacttatcctctctgtgctcagttttctcatatccrtaacgaggatagcaatggcatctacctcatagtgttcttgtgaagattaaatgaattaattcatgtaaagcattctgcactcaataagttaaagaaaatatttgcaatggtgaagaggacaatgatgataaaggagagtatggcaatatgtttgttccctgctacaagaagctttttgcttaataagggagatgatagatcacataaaacaatataagaccatatataattaaatgctagtttggttgatgaatatcagaagttaataagtatcctaataactgttggggacagttgaggaaggcaacatggactatggctttcaggatgagtaggctacagagaggtagaggagaaagtggtggcttagtcttctttacacgagggccacttctttcaatagaacactgatagtccttgttacagtgtttgttatatgttatttcagttaccattcgaataaacaggaactcaagatgctgggtstaactgaaatagtgaggatttgccttagtcatgggtagggtgtgattcacccatgggaattagagcatgaattggaaggtgattcaaaagatagtatccagatgtttagctgccatggaagccaggcagtcaaatcaggatttccctcagcagctgagctggaaagcagaataaaggcatgcccaaaagactaaaatctggggttaaatgctagaagaagaggtctgggagggaaagttagaaaacagggtttagaagtgaagggctgcaagatatgaatgtctccaattgatcaattaaggcaaattaattctaattaacgtatcagataaattaactcacatgaagacatcagatcctgcatcagtggtgtcgtgtgagaatgggccataaagaaaatggttctcagtggtagagataggattagaagccattcgtatctagaagttctgatatgagaattacctcctgaaaagatgccacagtggacgacccatgaaggccattgtcagattcagcagggggacagtcagtgatcttggattgtaagggagaagttttgtgaagctgagtggtaagtacatctttctttcaagatatatttatcaagttcctactgtgtttgaggtactgtattttttgaaatggtcttggagacagaggtgactcatccatgcatttttcagttgagaagctaacaggctaaaagataagataaatcctattgacaaataactaataaaaggtagaaagcaatgcctgatgcaagggaggcagagataaacaggcttaggagagcagagaagggaatgattgcttgcagtagagcccagtggctcatagccccagaactggggttggaaaccacccagcccagattcagatttctgctctatgtcttaatagcccttatgtccctgggtagatttacatacctctttgtgtactcatttgaaaaatgtagatcaaagcaatacctatcttacagagttattctgaggatgtattttgaggatgtattgagatagtacatccaaagtgtgtgtcagttaatcaacggtagttgttattaattccaaagaacgattttaatggtcaggtgaaacacaggttcacaggatatctgttatcaaagatctagccttttaagtactgtctgaattattgtgagcatgtcacatcttatttcagctaaaaaccgaaataagaaaggacaaagaagcattaaaaaggagttcactctagtgaaatgaaaaggggagaaccattgccagctgagatcctttcacctcttgggatttacctactgaatgtatgttcataaccctcagagagctagaggacaccagcctcttctgcccaactgactacctccctagaataccacagagatgcttaactggagtggattctgttggtggaagtgtacattgttacttcattattggagggcaagtctgcagtgtctatttaaatttaaatggaggaaaggaagtgaatacttctgaagccacaattatacctctcagtgtataccctggagaaatatgcatgcatgtgtgctgggaaccatatacagcatagtacatcagaaacagcccaaaagcccacccaccagaaatggggtaggtaaactgtagtggatccatgtaatacaatactatgccacagtgaaaaagaatatgctagaactcgatgtccccacatggtaaagtctccaagacatatgtcaaaaacaaacttgctggacaatatgtatagcgtgctatttatgtaaaatccatatatatgtttgtgattacatactaaaaattctagaaggatacataccaaattgataacagtaatcacttcatggttggggtaaggttatsatgagggaacagaataggtaaaaggaacttgagccttttaattactgtctgaattattgtgagcatgtgttcacatcttattgtataattgcaaataaatatacaaatatataagtaaagaggccagtgctctcctctatttgctacattctctcctcacttctrgtcagctttcaaaaaagttgacatcaaaacattctttagcaaaatgtaatatagaaaaggcattgcttagtttatttttatgtattaatcctttataaagctacataaagtatgctgcaattttttgaaattttgcaaacagttgcaaaattaaatttgattcctaagtttcatgggtaatgatttaatattctcctacacattgttggaattcacatatgccccaaataaaaacgagctacatagaaatataaataacatttatgtgagatggacagtcctgcttagcttgtttttcaaagtgggcatgaaaatgcccatttaaaatttatatttagacaggaaaattaccattatctcaatagtgtaagaaaaaaataataatcctagagattgatgctttcaagggcacagcagtaaacgcatgacttttccaaccatgcagataggttaaccaaacattcagatgaagaccgaggctgtcagccagacatttgctcattttcaaacatctaaatgactgatggatatttttttaaaattcatgtgttggctcttggaaagggmaaatagacactgcattacatcaaaattaaaataataacaataaaggcatatacttcatctgttttcaaaaatgcatttctattctttcatatgtgagcctcatagccacccttgctagttatttagagcagatattattagcaccattttagaatgttattttataacatttagtttcagagagctttaacaggtttgtccaggataggatgagcaatatcatagcaatgttttttcacataacacttaccactagtatatattacattgtatatgtgattatctttttttaatctggtctaactcccttactggaaaaccttttgagggcaggggctttgcttattcccttcatcacctagaatagtacctagcacttaggtagaaagtattctgtaaatagctgttgaaagaatgaatgaatgagtgaatggataggacttgagcctgagctagcaccccatccagcattctttccaccacatcagtcaccctcaaacaatagcatcagtcaccctcaatcagtcacccccaaacatcagtcacccccaaacaatggaagcactctgtgaagaatggaacctgaaaagatggaaatgaatctacaataaggaaaataaaggagaaactgatcacagactcttctgggaaaggcaggaaatatattaaagaagaaaaaaaactataaggataactgttatgggaaaaacaccttcatccccaaactaggaaggtrtcaagagaccgaagaatgatttggacaagtgcagcttggcaagcagatgagttaagatttacatatagggtactcctggatggcaggcaggaaggcacctctagagatccrccccacttcccacctctaagctgcttttaagctaattctctggctcttaggcctactgtgcatgcatgatgggactgttttccttgataggttcttagatactctgggatgtttgggttctcagggacacctgctctttggctggtcaccgtgacctcagctcaccaaccagccggctgtcaagatgcrggcagtggatatacacccttaagtaacctgatgggggatccttcacactacagtagcactggaaaagtcagtcactaagtacttatcaatgagacactagcaaggaggtaccacgatggcggaagcactcaggcagcaaggaagactgacaccaacgctgactcagcgggcttccagaagaatgtgacacgtcagctaagacctcacaaacaccaagttgaaattttcctagcaaaagtgatgagggaggcagagggagctgtgtgtgcaaaagctgtgaggagagacagacagtgatgtgtatgtgaaaaccataagtatttcattatggagagataatagcatcagagggcatggtaggtataggagaagaaaacactgaagatgtaagcaagatctagatcatgaagggccttgactgccatgtagaaagatatggaccttatcctgagagctgtggaagctgctgaagtaacagtgttgtgggcacagaggagagcaagcctcattcagtgagaaagattcctaagtcatacttaacaggttctagaaggatgagttggaacttgctaggtgaacaaggtgggagaggcattgaggatgaaacagcataggcaaaggcttagaggcatgaaggtggaggacaagggatcctgccaggttagcatggtttgggtactgtgggaataatgagcagtcatggagaaaaaagcaggaaagtcagacaagccaaattatgaatatcttatatatcatgctaaagaattatatttttattccataggcacaggaagatagagctctctagtatcatctgaaccttcttacatgacttatatcattcattttgtcaggctttgagcaactgcatgctgtataccatgttgaggtccttggtaatgtaacagaatcctggggaaaggagacctggttctgaatcccagatctatcacttactgaaatctgaggtcatcactcttaaatctctaaccttcaatttctccatccatagaatgggaccaataataagttttgcattgccttcttcatagaattgttatgaggaatcactcaaaaagtgtgcaagaaattacccatgctggaccaaattctgtaggtgggaaatgggatgaaggagagargataaatgcaggactagagagggtaaactagtgtgttggagaggcaggaaatacaggatggagcaccatagtgaaaatgaagaataaatgagtgtggttaaggttgtatactatcttgaacaagatattggagagttcaagtgggacaaatccaagaggaagcatctgtggaacatgtcattgatttgttagccaacaggtgtgaatgaatgaggtgctttataatgtctcttaatgattgttcttgacaagatgcttttttwaaacagggtcccaagggtctgctcctattggatgcccatatctatcttaatatggttttctaatcctgatgccttttaaagtttattcggatgttaaaacaatggtgataaaagaaggaactcctcattcatttatttattcaataaatatgcattgagtctgtccagggagaacgctgcaggatattaggccacacaggtggttcctgcaactcagagagcttacattctagtagataatcttgaaaaacttctggaaatgttattttcttaatgaattatgtcaggcttcgatcaatggctttgggtcccttggtctgctttccttccatacatttataagccttgtattcattcatacttgctcagaaactcattgctctaccagatctctttcagttgtttgccatagctgatttgtttcaacaaaacaatggttcctacataggaggtccttaggtccccaaagaactagaaagctggtaatggagatctggattatttttcaacttttaaatgaaaacgtcacacacacacacacacacacacacacaccccatatatatacacacatacacacacacacacacacacacacatatatatgtaatcctgttactactataccaaacttttttacattacagttttataaagctaggtgaaaacatggtatacctaccatttctttcatgtcactcttttaagttaatatttcattataattatttttgagaactcagtatttcaaaatatctaatgaaattgtggcatccttgatgaagcttggcaggctgagttgcaggtcaagtatctccgcctttgatcacaattgtgctggttccctctggcaatcataggtgatctcccactgatcagaatatatgattggcaaattcagatatcttggcctattaaatggtggacagaatttatgcataaattcattcataaatgtttggcaaaaaaaaagtatttcaaaacacaagccctggttacaggtggggagaaaaagagtctttgatggtataaagcctgggaattactgatctaaaaggaccttgtttgtgaaactaaacccaacatacagcagaaatggaaaagttaatgttaaatttgtgactttccaattacagtttctcttgaataaaagccatagcagttgaacccaagaggcgtatttaagctgtttaagaatgcttaagtaggatctgccctccattccacttgtactaattccggggcctctgattttttaagataagatgggtagcaatattatggaaggctatatcagaagacaatacttgttctttctagtgatacaagaattatcagtaatttggagcagggcagggataagcatgggataagcaaggagcttgcyttgggtgcaaatttaagagggtgccaccaggaaactcctaaatcaagatatgtaatattttaataaaacatttttaaaaaatcaaacttcatgcaaaaaaaatccatgatgaatgaaatatccaaatatttaatgaaaacacgatcagcatcactgattttctcttttgtcttaggctttaaaatggctcattatggtactgctgaattttattatttaaaattttgatatttggttcacaatgaatttatctgtattaacttctattttaaaaaatgtattgcattagaatataatttatctatctcagtcactgagctttttaatgcaccttaaattttgccttacctgcctaacttccatcaactagcccccagcatctgtgggttcttaatacaaatttgactttgcagttgatttgtctggttttagaactttttcttactcttctccctctccaagctgtgttaatggctgtttgggtaattctgattgaggtgtgcataaaaggatatttgctacacgatgaaaggcagtaagaagtatatttgtgggtgagatgttagtttgctgctgttggtgctaggataataattgctacattctgagagatgcaccagaggttggggacgagtgagtaggtcaaggctcctaatgatcagcttcttgcctacaggtttctggaggccattggatgagaaggcagcacaggtgtgcagcaggggcaggattgtctgggagacgggcttgcttttgtaacacaattttcactgtgttctgagctgtgattgacctagtgccttctagcagtgattggaagttaatattttgccctggtgtgtgtgtgtgtgtgtgtgtatctgtgtgtgtgtgtgtttagagatagatagagattccctcatttttttccattttatgtgatttccagaggatctctactgaggggctgcaattctttttttttgaaatgaaggtctctttctaatgaaaattatggaatgggtttacagcttcacatacctaagcattgtagaatgatttatggcagaactattcagcaactctgttctgcagcacatactaagtattaggctttagtttgcatgctaagcagaagtctttttttttcttttttaagcaatatcccttccaacctaggtcttctccctattttaatgctaatgagacagttttgccaataatagcagaatcaaggagttctgaatgtcaccctcgtcttctcattttgtcaaaccaactaaccagagatgaggcagagaaggtgaatcctttgagagtgcttggaaggatttcttagcgtatttgccataacgtctgcaagagaggaggtgattcagccttttgaggctatctgctatatggaaaactctgacagcatttaagtagattagacaccaaaccacatatggcaaagacatggaaaccagtcagattcttggaggcagggaagtgatgggtgaagatttcaacagaacagtggaaggtatccaggttaatatgtagtcatcatttgagcagtcctaccataaacaagttctcagaaggtaatgatacaggattctttcctccttagttcagctaaaatccaggtccttgtctcacaacaaggaaaacttagatatgcagacacattgaagggtgagaaaggtagatttatcaggtgaaaagaatgctctcagcaaagaaagagtgggtcctgccaacaggatcccacctcacagatcgaataccaggctaccacacatgagctgaagaggctagccttctccccctgcatgaggcgtgaattcctggtggctccaccccattgacccagtgcacatgggccaccagtcccttgtgggcatgcccaggcaagaccctgtgcaggttcccccagctgcacaaagacatctggcataaacacttgtggggcaggtcagagattctccagggacacttccttatctgcctcctgcatctatcattccccctactaaagaagtacatctaaatgcccttaggttagaagtacatctaaatgcccttaggttaaagataaggataaggataaggataaggataaggataaggataaggataaggataaggataaggataaggttaaggatgaagaccaatattaactgcttcctgctgacaggggtgctgttttggggaatcagcaatcagatctccctcataggcctatataagggtccctggtaaaaggggtgatcatcaaaggctccggtggcaggactatttggagtatttggagtttgatggcctgaaggccagaagagacaaactgggttattggaaaacatgtatcaaaatgaaacaaaaagggatgggtaagggcagctcaaaaatcccaaggctgctggcacacacagataactggtggctatagttatgcttgctaagatttgggtgcatggggcttgactttggttagctcccttggtcttattttctcaaaaaggatacctctgggtgatgggcaccctatttactcctatcacctgccaggatttgcaaggtaattgcccagaactagactatttgatccagatttttacattactcatctcttttgtttcttctgagctgcagttggagatcactggttggttcacaggaataatcagagttaacttataatgtgggggaaaaaaaattaaaacagctaatgagtctagaatttaatgacaaatgtctaagttttggaacataatttatctctctccagtcctcattcttgtcaaaaagaaatcatgatgggactgagttgtttgaaaaatagactttagtcttatacttggcctgattatttgcataaagtacagcacaaataattatttttacataggcctttcagattggctttgatggaactctgttccacaaggaatctgagataagactttttcttcttttttttaaagctgagcccagccatgagtttgtaccctcaaatacctgagttgcataaactcctctcttcttgaggtccaagaacatgtgattcctggacttgttagaaagcaacattctttacttaccatgggtcaggaaccctgtacagggactgtgaatacaaggtgtgaggccagttttcccaagggacttttatcagctctgcaagtcaagcttgattccttaacgggatgcatacccttccagtcaaagctttggtaaaacaaccagtttctccacttgcattctgttgcaaaagaaaatggattcttattgcactgacacaaataactactttgccataagtcatgaatactgccataagtcatgaatactcatgactagtttccaaattctggagaaaccaggcaaagagaaacaaatatgctccaaattttgtcacagaattgtactttattcaattattaaaggccataaatagctgaacataaggttccttgactctgaaaaacaaaacaaggatcagcagtgttctaagcaaacatttaaaaaggctacttcagttttctattagttcagtccattccattaactcttgttctatttgatattcatgaacatttcagctcttcatgaattcattattccaatgtcacaatctccaaaattacaagaaatctgcatttgagagtacctgtcaaagttctatagctgattataaaccatcttttgaacaggatcaaaacaagacaacaattgcctgtgaataaaaaaaattctagggtagttacagtcaaaaacacgattgacaaagaaatttggttatctctgtggtttacaataacttaacataatatcaaccttaatcatgattgatagcatatacccaaacattagaattttagaaatcccatacaattttggaatatatattaatattattccctaaattataacctgaagaagattaaacatcattttggcaatcccatgtacctcaacatgtcaaataatcctgtttacctctcttttgggtgctccaggggccatctgtagcatccaaaagctgaggtcagaaaagacaacctgaagctgaaatttgattcagggaagcctgttaaatatgttaaaaatttaaaacacttgatgctataaaatagaatttcagattaccataagttatttattttgccaaaacgatgacttaggaattttaaaacaaggcagaaaatctttactcattaacagggaagactttgttttccaaaaaatttttctcttgtctgctctttcttttccttggcagtctatccacaaggcaaatgaaaatcgctcattatcctttactagtacgtgaaaatcttgtacaagggagagaaagccaaattttacccttacattaatagtaattttacccttactattaacgtctatcccaattttctaatgaaactttacagacaattctatcttatcttaaccagtttaaccaccaggtgagatccttataatccttttataaccctctacaaattttgctaaagagcagattagtgccttaagaaaaccttgttgtgcttttacttcaatgttccatttrcagaaaaaccatataatacccttttgaattaaaaccatataatacccctttgaattttgtcaatgtgcaaacacagaatttcttttrcaagattaattcttagaaaccttccacaatgtgtttaaacctttagctttatcttatctaattttaaaaaattctttagccctaggcaaaaatttacatttccatgccctcttataatcttttactaaaaacacattttactgttcttacacaccttgtatgtaaatccattttcagtggtctcaattacatgttatagtggtaactcttaggaatttttaactgtaatgtaaaatctggtaagttgttttaattatgtgctaggcatcaataaagtttgactaagtttgatctaagtgcttatttttctttaagccaattaattagagctcttttttatagacatcacacacaacacatatataactacacagacagaagaagatccagtagctataaaatttttcatttgycaatctcaattctcagggtggagaaaaaagaaaaaaaatcccaatctcaacaatcccaattggattatttgcctcaggatggagccctttaagagcatgctgtttccagggcccaataaacaggtatagctggaagacaaaaacagattttgagagggatttatccgcttctaattcctgggcttccatgaggaaaacagaggtttctcccaaaatggaatccgtggtgtcttttctgtctttcccaaggagtcccaggccatcagaaattatcttaggggctctaatgcatgcattaagagtggcaaggcaaaatggagaaaaataattcagtcaactgaggaaaacccttttttcagcaaaataagattcaagaagagaaaaacataaaggccttttaaatatacctataacttggatatacacttctaattaagctgagctctctttaagaaaatccttttaaatcccttattagttcactttagccatgccaagcagctgatgtatctagcttttgaactttatcaaaagtaacctcaccagtgggaccaacaaacctcaattaagacacgcaaagcataccagattggctacagcttaagaccaacctcatatatcctttttcattaatcagaacttcacagataatataaacagtgattcttatcattcctcttactggtgtgcacagggagagggaagccaaaagcccaactggtaaaaacttttacccttttgccagcatgtcaggcttctgggttcctttcccctgagctcaactccaagccaactagactaaagatgaatggctactcatctagaaggggtaacaggcacccctggtccctttctctttttagtgaatacccaggctatatgagtgagagaaggaaaaagcatcctttttccttcttccatctttttattcccgaatcccagtggccatgacagggtgctgcccatgagtgtcaatgtggctttcacccatgttaataggggggcctgagggagggattatctgctcttacccatgaactccatgtcccgcctgctgtcagtagccttcaagttccaaagcttggaatggagtttggggcaaaaatgtgtctcatggggtttcatggactccttataagctgaatgttaaggcaaagctgtggaaccaagttcccctccaacaagggagagaaaagagcatcttgtgaattggggtcctggcctagtaaaaacaccttctaaaaggaaaaatctctcacacaaaagttaactcctgatagggtgaaaaaagaagaaaataataatagtttaagtgcaggactggaaagatgcctgggggaataacctcttattcttatgtaaatgggtttctccaacagggagagaaactttttttttttttttgagacagagtctcgctgagttgccaggctggagtgcagtggcccaatctcagctcactgcaatctccgcctcccaggttcaagtgattctcctgactcagcctcccaagcagctgagactacaggcatgcaccaccacacccagataatttttgtatttttagtagagacagagtttcatcatgttggccaggatggtctcgatctcttgaccttgtgatctgcctgcctcggcctcccaaagtgctggaattacaggcgtgagccactgtgcccagctgagagaaacttttaattgctgttggactgaggtggaccccttggccaggagaggggaagactcccggtgcatggcagggaatgctggccagccagccacgcagggcccttgggccatgtgccccagccccaaccgagaggggaggggggcggggagctgctgctcacccatctgtcctgtgcatgcacctgtggccattggggtgggggtggaacaccccccatattgtaaaagaaaagatagctgccattacagtcctaataaaaagaaggaaattgccatagaaaaaactgggctggactgaggccaacattcctgacccccaagagtgacaaggcaagtctcagttttttctacctttagaagaaatctgagaacaagaaggctccaaaacaaaagggaaagaaacattcaggtccgtattttactcacccttcctcaggtccccatatgggccaccaaaatgatgcaggattttttgctccttagcttggctaaaatctaggtcttgtctcaagaccaggaaaaattaggcacacagacacrttgaagggtgaggaaagtggttgtattaggcgaaaataaatctctcagcaaagaaagaaggggccctgccaataggctcccacctcgcagattgaataccaggccaccacacaggagctgaagaggccaggctcctcccctgcataaggtgtgaattcctggtggctccactccattccttcagtgcatgtgggcatgcccaggaaagaccctgtgcaggttcccttatctgcacaaaaacatctggtgtaaacacttgtggggcaggtcagaaattctctggggacccttccttatctgyctcctgcatatatcagtggcagagcatagcattagggggccccagtggatggagaatggctgggatgcaatgacttagtttttagaatcactgacattggtcaacactaatagctctttccagagaaacacaggtagtctggagccaggacctgataggwagaaggacaatttttgaattaattataatattataattaggtcgtattagtggaaggagtggggtaagatacacacaaggccagaaagaagactaccaaattgataaactccaacttgttatagctccatttgtaggaccagtgttggtcccagagaaggaggcaggttgcctctatagctggcatgttaagtaattaaaagaattactaattctgccctcttacttagcagtgacagggtatgccagcttatatttataaggaatttactatgtatagttcaaaaagcttcacatgtattagcacatttggccctaatgacaactgtatgagtttaatactagtatccttcccatttacaactgggcaaactgaggctcagtggatggataagcaatttgctccagatcacagcagtgggattgggattggaacctaggtagtttagtttgggagtcacattctttactgctatgcttacggagtttatacaagcagatcatcaagctccaaaataagaactctagtggtccaaaaggagcagaaatctgagggtgtagttaaatttgaatttggtggcatatctggatataagcctcttccccaaacatctaggaaataaggrtggatgcagtgaattggtgaatatgataaagaagcttcattcaggagactcacttgtagatgttttagcttaatctttctagaatgttttagaattcagccatgcctgttcattcgtactgactctggggaggctactctgatattcagctatgttctgtcaacttgtgggccttttgatgctgttcaggaccccatcccatcctcctgtttttgctacaggagcatgccttcttctaagacttcaccattcctggtgttctgatttccatctgaatcttttggtctaacctacacattacagctgaagttgttagaaaacaaggttcagcgactgattaacacacattgttagcctgggaagctagttaattaatgtttattttaaatgaaaacacctcaaattactcacttgaaatgtaaatacatatttaactttagtgtttttatcttccttcagtaagaggaagtaggatggccattttcttgtgttttggttaacaaatttacatcatgtggattttattttcccctgaaatttctataatattaactatctgaatttagcaactaattacttattgcatagcagtatcttttccactgttgtcttgtactgtcattgaactcattaattgctatttaacttttcatgggcttgtcttgctttctcaagcagattattaactccctaggatgggaattttaccacattgaatttctccatggtgcccagggcaatgccttatgcatatgggtatcagtatacatttttttttagaactcagaacactgacctttttattattaacctggccgtaaggaaaaggtggaaaggaagtgaaagagagagagaaagaagtgtaatctatttattcatctgtatttctcaaaaaggtgggtttttcaaaattctactaattttatccccactttacattcctaccttacagaggctgggccctctgttcatcttgagcatctaatctggacaaacttgtaagctctcttaggaattcaaggtttatattctaagccaatctttgatcctacaatatctttagaacctctaattgattctaaagatgaaaaaacactgtgagttgtgaaaacaaaccagttgttttgccagggttgttaggctggccattaaatattttagacagaagaaggaggtttgaaatctctgcttgagctttttaactgaagccatcttccaagaataaagagaggaaaagaaaagaaatggcttcccttctgcgcagctgctatagaataactagaatacctagaaagtatctatgtgcattcagaacattggagagacattccaaacttatccatgagaaagggcagaagggcctctgggtggttcttttggcatgagagccaacaatgcgtatggggagaaggatatttgttcttgctgtttataataataatggctaatagttattgaatcctgaatatatgctagatgctggtctaggcactttggatatttaaacttactcaatcttcctatcaaccctaagtggtagatagtgttcatttcttcacgatgattacattgagaaactttctgaaagtaccacagctaataagtgatagaaccagtatttaatatcaaggagtttggctgtagagcaagagtcagcaaacattttctataaagggccaaatataactattttttggcattgtggccagcgtggtctttttcycacctattcagctccactgttgttatcctaaaagaagcataggcaatatgtaaatgaatgggcatggctgtgttgtaatgaaactttactaacagagacaggcagaagagagatttggtccatagtttatgggcttctaatctagagctcagctatattcctttccaaaattaaagtctgtttttgccattaaagtggatgtattaatacatgtgagagagaactttttgtattgcccataccaaattgtgagttttttttttttctttttcttcttttctcaaatacctcatgatcctaatagaactaaaatgaaatctggtgaattggggcagtaggtccacttgttttacacacatgaatcttctgaaattcaacaactagtctttaggcattcatttccttgacttcatgagggtgatgatgatgtataaaatccccatttccttttatatgttatctattggccactcacaattaaggctctagaaccacctgctagatttgttttctgaattcaatttagtctctaccagtagagagagtattagataaaagtacaagaaaagagcaggttcctcaacctgtttaggctcctttttatttgtccctagtcacctgaacagatgtgaaatctctggaaggggctgattaattcagaaggagatgtaggtagagccaggagcactgaacataaagttgatagtagaataattaatactaataattgacctttataaatcaccttgtgatttacaaaaagctttcctccattcctactgatgaccaacccagctctctctttctatccctgagtgcctggggatttgtcctaatggtatttcagagtgtaaggctgctgatacaatctaatctgagcaggtactgggacctgtatacattacttattcrttcatttgctgatggagatggaaacccaagcatgacatcagtagatccacaagacaatccttcacatcttctatctctttaaatctgggttcttgcttgtcaaggagaagaaaaagtacattatttaaaagtgcacctgtcacttacatgcttggaaacatgtcacagtgaatggtgaaacattattaattccttttgccttcaaagaataattcatgcacttacaagtataatctgcatcacaatgaaatatttggatgtaagcgtaggtgtaattagcaccagaaaatctctgaaacaagagaagcaagaaaatttacagttaagtgagcgtcatacataatcagtgtgcctgggaatttaggggtgtgctacaaccttgtgtagtcttggcaattctgagggccagtgaaggggaggaatgtgacagctgtctccaaagattttgaatatgcggatgagacaaaagctattcatgctggctttgcacagtctatgcaatttagattcttcaatttagttcaactatttattgagtccctgtcatgtcaaaagctcatatttggacatagaatgatacaaatataataatagtgtagtgggtgtttctggtgcctttcccagatctcccttacatggttgctgtgagtataggttactgtcagctcacaactgccctattcttcgtggaactgtccttggccatgggagctgcttggccatggaggatacgtccttctgtgcccacaaaggaaggcagcctatagccagtaaccaatggatatggagggtttgaatggggggaggatagaaatggctggacccatcccaagagggaaccaaccttttggtgcaatttatgcttcagacctccctgtgggatcaggctgaagctagagttcagcttagctcctcccccgactctgtcttacttccctaactcctttctttctgagacctctccttcaggtaaatcgcagacacccaaatctccatctcaaatattaactctagagagcccaacctaggatacagtggtattatttatcacatcaattgctaggggcaagcattggctaagccatttgcataaatgtcattggatacttacaataactgttttcctattggaattgaggctcagagaggttaagggcccaaagccctacagttagtaaagttggccttccaggataggtctgtgagactccagaggactcattttatcctgctgtctgagttaagtaaggcacgtgatcatacctgctccctacccacaggaacttacagtttaacaggcagagaaagcaaatgaaaagctattatcagagaatggaagaaaggttatggggatccaggggagggagagctagcattcagttggaaaacatgactgtagagattttatcacatgcttatacagagaccatgctgatctgtcaattttttcagytggactcatgccggtgtctagtctggggtattttatgctttgtgtttgcagaatagtcatgcggatgagattaggagggtatgagcatgcacagttatataagctcctcatacacctgttgcagataaaacttctgtgatcatgatgccagaggatgcatgggatgtgatgcctctagattccagagataataggaacagggtctcaaattctttaagtcagaaaggaacatgattcttctttgctattgccttctctgaaattgactgcctgaaagtcatgaaacacactgtcaatgctcctgttcctatcttttggaccactgatctaagatagtaatagtggagatggagagaataatggaatgtgagacctatttttgaactagacctgatagattttaaagacttgctcatgggattgaatgtgacttgcattaaactccctctctattaatttccagtccctagaaactaatagccactattttgtctacagtcctcagagagaacacaatgtaatctgcattaatctgcaatagtttattccccaaccaggaaatgatctggggaaagattacagccttctacgatgtttcccacacagtgccttgttctggaaggtactcacactgaatagaactcttgctttggaaaagttagtgcagaatcaaactcaaacatttcttctctctactctattgctttggttttcccctggaaatatgtggtttattttgttttttgtcccttcggaaaagaagatacacatgtatgcatccatacagccctagcatccttagaaggacttgaatgttttctccgaaaatctcttagagcaaaattttaaatatcagaaaatagtactattatctgtgggatttggtctttgtagggaagatacataatcttcttaattatcatctacaacatgagtgtaatgcccctatgactcccttcctagtattggttttgttgctgttgtaataaacttacagattaatttggggagaattgatggctttattatgttgagtcctccaatccatgaacctagtagggatgtctccatttattgaggtctctttgatttctttcatcagcaatttgtaatttaatatacagatcctgtgtttttcactttttttwaaaaaaagtttgtacttcagtattttattttatttctccataacttgttggggtacagttggtgtttgattacatgggtaagttctttagtggtgatttgtgagattttggtgaacccatcactgagcagtatacactgcaccatatttgttatcttttatcccttgcgccctcccactcttcccccgaagtcctcaaatctcattgcatcattctttttttttttttttttttttttttttttgagacggagtctccccctgtcacccaggctggagtgcaatggctcaatctttgctcactgcaacctccacctcccaggttcaagcgattctcctgcctcagcatcctaagtaactgggattacaggcacacaccaccacgcccagctaattttttytgtatttttagtagagacggggtttcagcatgttggtcaggctggtctcgaactcctgacctcgtgattcgcctgccttggccttccgaagtgctgggattacaggcgtgagccactgcgcctggcccatggcatcattcttatgtctttgcatcctcacagcttatttcccacatatcagtgaggacatacaatgtttggtttttgattcctgagttacttcacttagagtaatagtctccagtctcatccaggttattgcaagtgctgttaattcattccttttatggctgggtagtattccatcatatacatattatatatatatatatatatatatatatatatawtaaaatatatatataaaaatatattaaaaatatatatatacacctaatattgatttttaaaaagcaaatacaattattcatttcaaagtgcctgatagaatagtgcctggcttattcttataatagaataagtgcgtggctaattaaatgcaaggacgttttatttttaaaaacaaattcctttcttgaaacwtggtaaattttccctaggccagattattgctaagtcaatcaattttacattgttgtatgtggcattttctgctttttctcatagtagaaaagaagttcttccagcattgccttgctctgactttcttaaatgctcttaatgtttgttgcaaggatggaggattacactgtgctcaccctacctgagcaaatgtcttctttgaactgtgwctagggactgggtaatccaccaaaatgatggaagcaaaaggttgccgatcacattgcagatctgctttgtggagggaagtagagcagcttttaaaaaatgtttctgcttagggactcagagccagcttttctcccttggacttgaagggcctcatcattttattttcccccccaaattataagaatctgcaataaatctccatctagaatctggtgttggatttttttctctcctatgttctagataataaaaatgttacagtttattcaaactgttcatgtggagacaatagtttcagctacaagtatggggagctttgtgaggaataaatcctatgttttctagaaaattgtcataggaaaaaagaaaaaataaccttttaaaggggttttaagaggaattatctttccgaaaattcctccctgtcacttatatgtgctcgaggttagtatgaattgagtcctaacatattggaattcaaaggaaccctggagatttcataccctccttattcactttatagcaagagtaaaagggaatcagaactaaatctcaaattaggactcgatcgcagggcacctggcttctaacatggggtgcagtccctaccgccccagcttgagagattaaaaaggggccttgtgcctgtcctacctcaaccttctcctttcayagatgagagggtaggcccatgtgaactcagatcttctggctcctggtcatggttcttcttaaattatcaaatatatggaatcgaaagatctttcaggaagcagaatattcaaaaacagaatagacaatttggggttttatatacaggagtctccccaccgtactcataattgaccttgaaaaagtatgtttgacttgaaaaggccaatactttctaaaaatagctgtagtttttgtaggrtaggtcaaaaacaggcatgtactccagcatgtggccagtagagggcgatcaagttaatacaatctgagccgtgggctttcaattaatgcatggaagtgaataaataaaacaaagaaccaagttagtctaaatgttttaaaacaaaccctgtaatcaatatctgctaaatggaggaaaccaatttttctttatctactgtagtcatttaccaaggagtattacagagttgtagcatagcctgttacagttccttaattaagccctagaaatccaggcagcttgctattccatcattgtcagggctcttggtggccatcaggtggaagacaggcatggaacttgacatgtgtttttgtagcacttatagcattttcatattaacaacaacgaaaagctatactcttccagagtgaaagaacctcttatcaaatgtgatggggagtagctcttaactcatttctcacacctcccttttcctccctattcaattttcaaggactcagcaataaacaaatcagcggtggaggattccacctccctggctcactccacttccagcataaatcagttctgctcttgattagagccatgggcgggttgcagcatttggaaacggaatgaatggccccgtggtcaggaagactttcacgatcttgagtcacaggcaaaatcagtgtggagggtgaaggcaagtggaaattccctagtaatccattcgtttgtgcatttagaaaactttccttaaacccgtgatgcgggccagcccctatagcaaaatctaagaaataagcacaagaaagatctttggctttacttaggagccaagctgggtattttcttggacaggaaatgtattaagaatactccagaattatcaacttttattgaaaattgactattatgtgcaattataacagctggcatttactgagcatttactatgtactagggctctactaaacacttttcatgcaatatttcattgaatcctcatgacttacttcttttatgctgtttataatctcctgatgcacaaaggtgttaagtagcccaaagtcacaggcctggagatgagtcactatgtctcatatacacacacacataaaatgctaatccacaataaggaagggctcaataaatgctttagcatgttaataaggtatcacttagtgggacttgctrtatgtcatacagtatgctaacttatttccatcttacttaatccccatgaacacttctgtggaaggtactgttattattgtcattttgtaggtgaagaagcgggtaagaaccttgctcaaagtaatatggtagtgagtgcaagaataaggatttgaggccaggtgtggtggctcacgcactttgggaggccagggcgggcagatcacgaggtcaggagattgagaccatcctggctaacacggtgaaaccccctctctactaaaaaatacaaaaaattagccgggtgtggtggcaggcgcctgtagtcccagctattcgggaagctgaggcaggacaattgtgtgaacccgggaggcggagcttgcactgagccgagattgtgccactgcactccagcctgggcgacagagccaagactccatttcaaaamaaaaaaacaaaaaaacatgaggatttgaacctgggtctgatttcagagctggagagtttaataggaagccagtgggttttgaagctttaatgcatgtaggaatcatctgggagcttgaatacagattccctgagcccgggccagtgattggaccctaatcatcttacaaatcacctgagaagctttttaaaattacccatgttgccctaccccagcctaatggaaccagaatccctggaagctgagcgtctagacttcaggtgagtctaaagtgcagctaggctgatctttcatcagtctgggtggctctcaggaaccccttatttttttgtaagtactccagcaagaaaagttgcctaagctctactgttaattaatctaagctttatctaacctactgggagaaaagaaatggttgtcatccgtgcagcaaatgatgaatcgacggaaagccctagcagggccaagactagcgagaggcacccagggcccacaattcaaggagtcagtgcttaggacttgggagagggtgaatgcctctttaagtcagtaccctcagtgcttcacttgttgtgccgtggagtccagcacctgggaaacattccaggaaggcaccaagagaggaggagaaggaggtaaggttggagatttcaaagagggttggatctaggggtgggagaatggatgctttgacaaagttctcccagtagttattgttgtttgtgccctcgtttgagaaagacagctaagaacaaggcaggagggccaggcacagtggctcaaacctataatgccagcattttgggaagctgaggcaggcgggttgcttgagctcaggaattcaagaccagcctgggcaacatgacgaaagccagtctccacaaataaatgcaagaattagctgggcatggtgacgcatacctgtagtcccagctagctactcgggaggctgaggtaggagggttggcttgaacccgggaggccaaggttgcagtgagcagagattgtgccactgcacttcagcctaggtgacagagccagaaccagacactgtctcagagaagaaaaaaaaaaaaaaggcaggaggtgtgatgagggaccccaccctcctttgtatgggagccaaaggaggaaggagcaggtgctgattgcctaacagatgtccttatattatcttaagtccattagacttgtgaggcaggtattattaattttttaattatcctcattttatggatcgcaaatggaatctcagtaaagtatggtcattggcccaaggccacagaactttaggttctgcagagctggggtttgaacctagatcagtctggctccaaagcccgagcttgcttcactatatcagtctgcccatgtggaaacatctaaggtgtgaggcagcgcccatgccagtgtgragtcatgtcatccacctaaccacccaagtgctggggggactgcctcttgcggtaaggagaaacttgggctatgaacttgaaacaaatragagccttggaagaagaaatgcgatgaactgcacccttcattttgtgtatatgaatcaccaacagtagttcccagctttgtgactaaagacaaacgtcaatgccaaaatcaccctagttcatcctagctgcagcatcaaacagtcatggccacctaatccagtagggaagctagcaaakgttgagtttccctaatttaagggtcagcagtctcgggcacaggcacagactactgagttgctctgattaggagggagcttacccagactcactcttcagcaagattgaccagctccctgtgggggagcaagaatgagattcaggtgacaagcaatggtataaaaatgatgtgtgaacaagtgcaaacttgcctctctggccttagaagtcactgtggattgtgctgtggacgactgggagagtgactggcagggagttgatcctggagcaagtgccagagcttgtggtcactgaaaagccttaattatctaaccacaggtggwtcccaaagaaagaaaacaataacgctatcctcctgcgctaaatagtggagaagtcttacttagggctgtgtacaaaaattaccagggaagatggttttacaaaacacaggtgctgggtataaccctcagactctgattcaaaagatctagtgacgttctttgtagtttcaaaatctccaggttattctcatgattaccttaggctgagacaattctaaaagtgtaaacccaaggacaacaaaaagaagtgagaagtgcgtgcacatagcaggaaaaaaaaaatctaatacatgaaagcccttgaggatgtatatgcatgtcaacagtaagtgacttccgtagagggtgaagggtacataagaatatatgtgggatgacatgaattttggaccttttgtaaggtttaaacactaagaatgaaacatcattcttagtaatgaggttgaggaaaattttatttacattcttgagaagaatactgttaaaagataaactgaggcacaataaaattgtatagagtttattcgggcaaacagtgactcatgaatcaggcagcaagtggttcagggttccactgaagaagcccaagagggaggcttttatagtgaacacagaagcaaggcaaggaagatatctgattggtttgggttatgtagttgcctcgttttgtctgtcctactggaaagcttctagttacataactctgtgttagatggcagcttttgattggttcagttaaagttccatgtttcttaatgttggcatttataagaaatagctcaagttaagttccacttgtggttgygattcaaacaagtttaaggtcactttcaaggcctatctctgtcttctctagaatttttcatgcctggtctccattttagtttattttaacaacattgcatttgcttgaaataatcgctcagcaaagttgtttactaaggagatgagaaaaggtagagacctcaaggacatgtttgagtaaacaaagatgttccacaaacagccttctaaggaggccggccagaattctctggaggagtctctgttttcctgagaatcttggtgtttaggttggcaagttaaaagctgagagagtgttatagggagttagaatacatgggaaagtaatttgaaattccacaagtggaggggacaggattcaggaaagcagagctgctggtgtcagggtggctaaggagggaytttggagagcaacaatgtctgtggattttaaattttagtggaaacaatatgcactccaaaatatcctttacaatgactyaatcactcttcagtatggaagaccaaggaaaaagtgaacagaagagaaagagaaaaaaaatggaaggaaagaaaaaagggagggagaaatttattaatttaggtgttcattatttacctttgaatatttctatttaaaccctatgctatatatgtttaagttgattttatctataccctaggaatagctaacatttgaagtgcccttgagaagaatacacaccccagagggtagcactgaagagaaacttattagtagtcaaccgttcaatggcagccaagacaagtgatcaactctccttacctaaatctctacctagagactttgttggttaacataagaaatattataattttttattggtgaaatggatggtcttcaagacatgtggattggtcaaaagcatcacacaggaacagctgcccttgaataaataaggtatgaggatctagcaagtccaaaagctgtatgctcctttctagtggtggccctcgcttagggatccatttaataattcttatgacctgccacttaacagagaatttgtttggctgattttaactggaatactggctgaattctgctgctgacatgatgtcacatttgcctcaagtaatcttttcatacaagggtccttttgaaagtgtcttaacagagatggtgcttcgccatctcatatgagaaaaaaaattgtgtacatgctcatgaataaaaggatgtatgtgttgcagaaattagtcagatacatgttttcattgcagcatctcacctagtggctgggttgggagaaggggacttagctctcacttgcatctcattactggaggccatcaacatgtacccaaaaaaatcctgccagcagggaatggtggcatcagcttacattattctcagggttgtcgagactagaattcttgggggaatatgtgaaggtctgaattttgcaactacattgacttagaaccaaaaaagagtaagccttatctgggcaaaggattagctaatatctggactgtaagtcagagtagcgaaaaatatttagaaggcatcatagacaatgaagatatcattatttcctccaaaaagcctaccaaagctataatacagtacaagaaagaccttactaagcatgtaataaaactgtgagaaatcaaagtagggcaagatcgatggtgggtgatactgatggatatcaggaaaggcttgatgggggtgatatatttgagatgttccttggaggaggagtgagagtttcagcataccagcatgagagaccagatatggggagaaggctgtcaatggcaccattttaagtgtcagaaatggtgtgggagaactgagacaggataagacgtagttccgtaattttaagacatttttatgctgttgaggatatcacatttcctctccccatttctctgttcagaagttgcttacctctttcttgcccactttcatgtagagttttgcttttgtttttgttttcacttgtagtttgtggggtcccactaggtgttggcttgtctgttttttttgagagtcctgttgcccttgagaatgggttatgtttttttctcaaatatagaagaaaattgaggcagacagaaactcctataccttttcactgcccaaataaactatctgtatctctatcctgtctctttcagtactgtttctatgaagatgatatctctgtgcctatcagaaatcaatcctaatgctttggtctggatcccggtccttttcaccttctcaaggtctttgcttctgcaattatatcttcctttattcctgaatcatcacattatccctttcaactagtccatttccattattatacaaatacgctcttggwtctcctattaaaaaattgatctcttatttccttccaactaccactctcttcactccgttcacataaaatcttgagcttattatctacaatcattatttttacgtcctttctgacattcttaacctatctgatcagactttcctccccaccactccactagggccactatcatcaaggtcaccactgatctatgtattgccaaatctagagggttttcccttgttcttgtctaccatgaccttacagtagcaycacatatagtcaggccctgcctccttgaaacacttctttgagttcacaagactccatatcttcagtcttcctctgacttaactggccacttctcaaattcctttgctggtctttcctcctctgatcaatctgttagtatgacattccctatggatatgccttaagaaccatctgctgaatatgccaggtcttttgctcttgcccgacagcacattgagtcttcaggactcttatttccaacagtcagcttgccaccaacatgtggatgactggcagccatctgaaacttascatgatccaatgaaactcttgtgttctctcctcaaacatcacccatacaacaactttccccaaccaagtaagtgaccccaacagccaactgactgctgatgccaaaaacaaacagaaaaagtagctacccagtaattctatctggagccttacagagtctacctctaaaatccaaaaacctcaatgatcactaaggctacatatcacacttagaataaaatctatactcctgaccctgacttatgtaggtcagcaggatctaacccctttctaccttttcaatgtcagtgtgttctatcccaacccccattcattatgctccaggcagtttactgaccttcccagtctgtgagcatattaagctctttcctgcttcaaattctagtaccatctattttcctgcctgtgacccttttttttcttattatctatacatgrcgtcttcctgctaataatgcaggtctgagcttaaatgacatcattctgactgcccagtccataggagccaccctgccaccctcacctcttgctattattttcagcataacaccaccatatgaaattcttcttgtttatttattcatgtatttttggagcacatctgaccccagcagaatataaattccatgagaggaagcactttgtctcagtacctaaagcaatgaccaccaggtacgaatgctcacgcactatttgttgaaggaatgaatgaaacattgtaaagatgtgtcttagagccttagctccctggaggatttctttaatatagcaatgggcccttgtacagctaaagaagctcaggtgcattgttggatgcatgctaggtataccttctctatggactggcccggtagaggaacaggtaggtatcacaggcccctcccgacgtcactagcctccaaactagtgtagctgcaaagagatacgtgtatacaaaaacatatctccataaatagaagatgaagtagtattgacttttttgctcttcctaaaaagacttagaggacttaggtcagtacaggacttaggtcagtacatgtctgtagtgtgacactgttgtcagataactgatttgacactgggctgggtcgttattgttgggtcagaattatgttggtgttggttcaactacattttaagctgcaaatacccttgctactcaaaatatggtcctcagactagcagcattggcatcaccaggcaagttgttagaaatacagaatctcaggccccagcccaggccttctgagtcatatccacaattttttcaaaaaatgtagatgtttcatgcacacactgaggtttgataaacactgtgcttagactatttttccatgaacctatgtattgttctgagcactatcatgtatgaaggataaagatagatgtgacagagagtgattgggacagtgagaatacctgtaaccaggacacaagtgaaagtagctccttccaaatatgacagtcaaatatgtaacagcagttctgggcaccaacccatcaaaacaggccagctgcagcacaggcataaggtcctggtgtatctcccacaccctgccacccccttagttgatatagaaatattggggggcctccgctggaagagtggccaggtgacgggggaaagatacacaagaggactatgacagtggatacttattgcaggcaagttttatagaaatgtctattttaataaatggtgtggtgagagggtgaatatctgttaaagtcatcctcattctgtcctacctttgtttcttgtgcataccactattactgggcttaccatgttgtatcattagttaatttgatgtctgtctcctctatcaaactgtgtctccttgatgacttgacccaggttttattcctgactttggtgagtgcttaatttgtgtttgctgaaatgaataaatgagtaagtatgtgaatgaatgaatgaataagtcaatgaacaaatggatatgtaaggcagtgatatgaaagaaaggtcagacttattccgtgtcaacccagagtgcaaaaccagtgtactggatagaaatatcaacaatacagatttgggttcaattttaaaaaacttctgaaaattagaagtgcaagagaaattggttgagcttttctgggagaagtaaaatgttctggaaccagaattattcaaacagtctaataaaccatttgatgtacaaaatatataaacaagactgtttataggtaaattccaacagccataaatgtatgaaaaatttgttcagcctcactgggattcaggggaaattaaaattgcagtagcataccattacaaacccatctattgacacacatttaaaaatgtgattataccaactgtggccaaaagatgtgttttaaattgttataaccactttagagagatctaatttgttccaagataggcatactctacaattaagcaatcctgcttctcagcatccattctagattttttaaaaatgggatatcctagttcataaacaatgagatctacacaaggatattcattgcagcataatttaaaatagctaaaaatggcagaagtggggtggatccagctatttatttgtaagcaaatggacaaatccatgatcatttatacattgcagttaaaatgaatgaattgtatcattgcagttaaaatgaatgaattgtatctgcattatgataaatgaaaaaagcaagttacaaaggatagatagggctagatgcattttctataactttaatgatacctcatagcatattatgtgaagactttggatagaaaaccaaaagcatatttgcaaatggctttgaccaacctcagaaatgagatgcctcaagggaggggagagaaagagaaagcatacakagtagaacttcaaccctatctgtaattatttttttcaagaaataaatcttagtacatttagcaaaatatcaatggctcttccagaaggatatttgagacattggtgtctattatgttattgcctgagcttcttggaatctgatatgtagtaattcttaaaaactgaaggataccaattgtcatagccgttgataggatgggggataaaagattgttcgctctgtcctcagagccaattcttatctctttcttctgtaatcggatgtaccagagtgtccaggaactttttctctaaagatggggaaaacaagatagaccagtggttcaagttccttggtcattatccagccaagccttttaagacactctcacaggcttcttgttgagactccttcttcctgacagtagaaggtgtgtgttcattagtgagaacacccactaagttccagaaaggaaatgtgggtcagagaaaaagcaacagatggagagcaatgagataatcaagctgtagtgkacactcaggcctgctgctttctttatgtcagcctatgtacccctatattggcagccaggtgaaccttagtacccatgctttctagctcatggtgctttccccacatgcattatcccaagagatattcacaatacctgggaagtaaataggactagcctggtttttagaggtgagggggcaaaggttcaacaaattgaaaccaagatttcacaggtaataaaaggacatctagactcaagctaaagttttctgacaccaaatattactctccttttataccacctttcaatttctgcgctaagcaccttgttcatttagcacgtcatgttatatccttacctacatccaacatggttttgaggtactgaacggcatacrtaaaacattttcatcagaagggaagtgaggctggagtttggggagtgaggagcagaaagagagaatgaaagtaaatataccaaaacccaggctaaaatgattaatttagtattgaattcgtgtgtgcttcctgacacaggtgagacaggacaggatatatggttttattatctgataaagggaatcttaccagagtgtcaggagagacaaatgttttccttggaccttaattattaatataaaatggatagatcatataaattcttattcaggaaactggtatagttacaaatatatttccatttgccatgacagagtgctgtttggttgattacttgctttttaaattgagattaacatataaaatgcacaaatcttaattgtacagatgaattaattttacacatgtatatactacataactatcacaccaatcaaaatatggaacattttcatcactccataggttcacccccatcccttcccagtcaattaccaacacccttcrccctcacccaatagaggaaaaaaatattctgacctttataactatgaacttgttttgcctgttttaaaacttcatataaataacatcatgcagaatgtactctttgtgtctggcttctttcactctacaacctgagactcacctatgttgttcaaggtaggaattgttgattcttttaatgtgtaatttgtaggccattgtatgaatgtacaaaaatgtgtttctctgttctggtgtcagtagacatatgggttgttcagtctttggctatgataaataaagctgatgtaaacattcttgtacatgtgttttagtagacatgygcactaatattttttgcatctatacctaggagtgaaattattgtcatagagtagatgaaatttgtagtttttatcaactgtagaagataaggccaaacacattttcaaagtggctatactaatttatattaccaccagcagtatatgagaattccagttgcaccacattcctgccaatacttgctattatccattgtattaattttagccattctggtggtggtagtggcatttcattggggtttaaatttgagtagtgttgagcaagtttatatatgcttactgcccatttggatattctcctttatcaaggatctatcaagtctcttgcccataaatgaacaaaagacttcgtcttttccctattaagttttaaagtatttctggataccgtatgagtatattttggatacagtatattctaaattcaataattttgcctggatgtatatatcttctcccaactcatgaattacattttcactcttttgtgatatctttaggtgaacagaagtttttaattttaaagaagtccaattaattgtttcccctagtgtcctgctaacgaagcctttgcttactccagtttcctgacgatacattcctatgtattcttctagaaactttattgtttagtgtgacacaattttaaggacataatcttttttttttttgctttatacatttatttaggttttttttaaattatactttaagttatgggttacatgtgcagaatgtgcagttttcttacataggtatacatgtgccatggtggttttcacccatcaactcgtcacctacattaggtatttctcctaatgttattcctcccccagcccccacaccccgcaggctccagtgtgtgatgttccgctccctgtgtccatgtgttctcattgttcagctcccacttatgagtgagaacatgcggtgtttggttttctgatcttgtgatagtttgctgagaatgatggtttccagcttcatccatgtccctgcaaaggacatgaactcatcttaaggatgtaatctttagagctgaatcttgctttcaggccccagctttccaacttaccagatgaatgaccctgatcaagtaactttgaacttcagtgtctttatgtataaataaggtaaaaactacctaataaatttctggtgagaatgaaacaagatatacttgcaaaacatctagtacagaggagactctcagaaaatttagttattgccctcttttccattctactgcataaaagctagcaatacttaggagcactggtctcttgcattcaaaatattaataaattaaacatttatttatactagcatcttctcttagaggggcacaatgaagacacaaaagtatggttctcttagttgaagagacaatgacaacaagagaggagtgaaataacaacacaaaagttaagtgatgattaaaaaccccacagggaagcaaaggataaattgctaaataggtgaacattgtcataaacatttagagaggaagagttgtttcaattcacagcaacaaaggagattttccatgggttggtgatggtttcggtcaggatgtaaatagcatttgtacaaagagggaaaaacctcagatgaggtctatgaatgtgagcaagaaaacacattgcatttatagggggcacttttctagttggctggagtgaaagatttgcttagatgaagattgggagataattctatgagttggttaattcattaattcaataaattaatatattaagcagctagtatgtgcccatctctatgttgcttggtttccccaactatgtcctctttacttccctgatatatgtatgtgtacatatgtatctacacatatatacatatatgaacagtatgtcctcactaatattaccagtagattcttggaaactgactttaagtgaaacaacatataaacaaaaccaattttttttctcgtcaacatgataaaacattacattgaaggaaatgatattattgaaggacctactatacattgttttgcttaaagttccagtttctaagaacctatcaacaacattaagtgaggacttacatagacaaattattttaccttttattttttacagagaatagatagaaatcaaatgccatattatcttacagaagctaaggaaaaagcagtwtaagaagatgagctccatggtattcaatcctcagagagcaagtacagtaaggactgagtgaaggacattgggtcctcaacatcagaaaactctgtgaaggatacatttattttgtctcaggaatgaaaatcaggttgcaggaagtgaaaaagagagctggcaggaaaggaatggaggtgggaaggatggagggctggttgctctgctgcctttatacctgtgggttaggtcagtttgcatcttaggccatggatttcccagcccatggattaggaagaatagccttgtatcacggagaaggtgcactctgcaagcatgtccacatactaagaagggtgttactccggggtccacggggactcattaccgaacagccatcttccattttctgtgaataggtggcctttggacaaaattcttctgtaagcttcagtttcctgatttataagaaaagtttttggttttttcttaaaaacgtttttcctcctcttaggattgctgaatggcttgaattaaatagtgtatataaagtaacatagtgccagaaaaagtaaatgctatattagtccccttcccttttaagaaaaaattctgtggacaagaaagaaggaatgttatacagagaatgagacagagatagacactgagaaaaatacaaacagacactcatagaaatgcacacaaagagggagaaacagacaaaggagagagtcagaaggagacagggacaaatacagagacagacaggcggagaaagagaaagagaaagacaggttgttttaactcatccctcccacagaaagatatatcggtatgtagaagtttgtgtagtgatttagaagccctatgtgaagagcataggcggcatatacttttcaaaggtaacatttatcccattttacccatggcttataaaacctcactggctatgcagaaagcaggtctttccagggcacattcgtttcattgtgcagccctcttaggaagtcctcttaggaaaccctgtatcmtggagatggtctttgggttccctaaagtgtttgccatttcctgctaaattgaattctagtgtatacagcaaggtccccctccaacagcaatgttcattgtcttgtacaactgcaaatcaaaattgagtccaaagtgttaccaagttccctgagcttagagcttgaagtaactctccaggctgtcctcctcatcaatcacccttagggtggtttctctgatttaacatgtatcttttatgcatgagcaaaacgagtaactgagaatggggggaaattgtttagccagcagcacagtggccaatgtgcgggagtgagaaattaggctcagaaacggtcaatgtcctttgggctttcttgctcccatctataccactgaaaattaaatmttaatgttgggaaaactcattatttttaccactgagaagttgttagggtcctcagtgaaatctagttcactggttcggggaagctcagcacacagtgggaggttttgcctttttaaaaatttttataccatttttatcctaatcataaaaaatacacattacaaaaagttggaaaatartggttagaaaattaacttcacttcatcatcataacacttgaaaataacctcacttaacatttggttgtatttccttccagatattttttccttctcaaaattaggatcatattttatatacttttttatatcctgatttttttcagatagtattttttggtgaggatttttctgtctttacataatcttcaaaaaacattatttaatatttcttagtgtgagtgttccataatatatttagctaatgctgtattgttcaaaatcctgttatttgtaagtttactaaaaagagtgtgtagtcagcagctatttacataaatctttgtcttccttggttcatggtaacttccctggggtatccacttatctttcctttaaagaagcccagatcatcagataatctacatagatctgtaacccagttttacaccacgttccagttcatctcatgtaggggtgtgggcagaatttattttaatttctctgaatgttctgtgagagttagactgctggtctacctagaatgcataaaaaacccttaggtttaggacaaagaggaacctacattaacttaaagatgctgtatttacagaaaaaaatagttatattctatttacctattttaaaattttcattttacatttaacttttaaatctatccaggatgtatattatgacaaatataataatttttgttacaattagccaattttcttagtaattgttaaatagtccacttctttgctgtagattttgatatttacacygttatatcttatacaaaaatatgctagggaatatttcagcatcatcaatgctgtttaattgatctgtcaattacttatcaatacctcatcatattagttattataactttataaagttttgatatctctrcaagtaagtctttttaaaaaatcttgtttgttcttccatgtaattttggaaacagttttaagttactgaagaatcccttaatgttactgaattaggatttcattaaaactacatctatttaagaattgacgcctacttggcctatcacttttgaactatgaagattctcactgatctctatcttactgatttatctatcttactcttcccttctgaggttgcttttttctagctaatttttaaaaacacgtttacagttacttaataacttgtttgtttacaactatacctatttttccttgcctattttaaaatcatggcttcttttaagcatactggaaaaactactgagaatacgtgaaatactaataactcatcattctaaaatagcaaatattaacattttgccatatttgtttctgatattttcaaataaataaaattttagtaatctgtgtatcctttccaaattgtattccccatctctcccttcttctcaagatagagaaccaatttctccaagttaatatgtatccatggttttataactttaccacatatgcatgcatgcataaaatttatagttttgagagttttaaaatatgtatattataaatgtcatataaaatatatatacatttcatattatcactgttctattgtttactagctattgttgttaatgtcttacaatgcctaatttgtaaattaaactttatcataagtgtctacgtatagagggaaaaaaaaaacagtataaatagtcaccagctatctgagacttcaggcatccactgaggttcttggaacataatcccctgcagagaaggcaggaatactgtaacacaaaagagagttgatgtgaatttaatgagtcaatacatatataaaatgcttagaacagtgccttcctataaaagctatttaaatgttagctatttttatttcttctcttggctaacttttggctgctaagaaaaccttggaatccaactcaagtccaagacctaatgccagcccacccttggtccctgtggtgacactttcacacattgtacactcaccaagaccagcatcttttcattgaacaccatagtaagtgtacacatagtgacacaaaaactcagttaaggtcaatattggtgtatttcttgcacacttctgtaatcttcctatcctatctttttgaccttgaaaattagagtacaacatttgcatcagyagcatgtggaacgttttctgtgtctggttttgcccatcttttgaaattcgtgattacatgatcctgcctgttccaaaggaagtagaattgtagcactrtggagcattagcctaatgatggaattgcttactttctaaacaaagcataatctgtgaaacctggccaccatgatgaaagcattttattgacagatttgtatataatctatagtgtatttttcacttttgtgcttggtaattttttcttttctgaaagttaaggatgttgtagctcttacaaatggcatctgcctcacctgtgattttaaaaagtgtaagggtttttttcttttcatttcttgcttttgtaaycatatgctggcatgtaacatttataacaaaaacacagtgttcttggcattctcagaaatttgagaaaacctattgtttgagggggaaaatgcctattttgaagtgcattttcctttgttccttgaaagattaacttttagagggggatctcaaggaaagcagttcctattggttcattcttttcatttgtaataatctgtctttgatgtacaaagtgagtagatcttgaggttatgtggtagagtgctggaggtgaataatggaagaacaaaaggtgcttactgtaacttgtgacccaggagcttgccaaactgttcttccactcaattttcctatacagggtgcacatactcctctagagtcacttttctataagccaacaagacagaatctcattgttacacatttcttaggtagaatgactgcatgtgatatttaaaaactttggagtttgctgactactgaactaattatcctaaataactgaattcagatgttctgtttagctgacaactaattcttccttttatgactttttttttaaactttttttaagttcaagggtacatgtgcaggtttgttacataggtaaacttgtgtcaagagggcttgttttacagattatttcatcacccaggtggtaagcctagaacccatttgttgtttttcctgatcctctcccttttccccaccctccatcctccaataggccccagtgcatgttgttccctgctatgtgtccatgtgctctcatcatttagctcccacttgtgaaaacatgtggtatttggtgttctggtcctatgactaaggataatggccttcagctccttttaaaatccttttgtatgtagttgatagagcagcaatttggtcaccagagacctcatagtgttggcttctaccgttaactcttctgaaagtttttattcctctaggactctgtttccccatctgataaataaggggggcataaaacactgtcttaaatctccctttcacatgtataattctatgttgtattttcatttttctgaacatgctgtttcatatttaggagaaaattaaatgtaattaaataatttctgtataagataattacaacttattatattcaatatgttgtaatacaactcattccggcagctattctcactgtatagaacagaattgaagacagcatagggagtcatgttgaatatttgctgttgaagaaaagttattcagggaagaaggaaccattctccataccttctaccactgaacctttaatttctctaatcttactttcttgacatttgcctctttttgtctagcatttaaatacaaggaaaggggccaggtgcggtggctcacatctgtaaccccagcactttgggaggccaaggcaggaggatcacctcaggtgaggagtttgagaccagtctggccaacatggcaaaactctgtctctactaaaaatatgaaaaattagccgggtgtggtggcacacgcctataatcccagctactcaggaggctgaggcaagagaatcacttgaatccaggaggcggaggttgcagtgagacgacatcaggccactgccctccagcctgggcaacaaagcaagactttgtctcaaaaattaattaattaattaattacaagaaaaggtatctgggtcatcaggtttctagtaattgtgtcttctgtagccaattgagttgtttgtattgacttattggctggcaaatggtgagtaagaaagcaggggaaagagataggttgtaggaggattgagagaaggtgcacattcttgatttcatttaggcaacaaacacacaagacaaaatatgggtcaatatgtggataatctggtagaaacctaaatgccctacaacagagtcttcaaaatggctaaagctgcatgtggaaaagactgctaagtgtagagatgatcacataatttatcatctaaactgggacatctttgagaccccattttataacaatattgggacaacaaatgcaaatagaatattctagacaaattagaagttataaccactctggctgcatgttctccaaaaaatatttactcctcttcttggtccattttaagggagtggaaaactttcaaattctcttcagtgtcattgtgtgtgagggattctacaagacttccctcagttctatccaatccaacaccactgtgtagtccacagctggactacatttccctagcctccttttacatttagttgtattaaagaggccaagttctagtcaatgaaatgtgggcagaagtagtgaatattatttctaggtttaagccaggaaaacaacttttgaaaaatcctccacgcttttttccattctggcttgacctacacagcatagcggcctttgaagtcttgtattgcagatagcagagccacaggacagaagaaacctgggccctgacttggagagctatatgccaatcaggaaaaccagtttggaaatttatatgtatgagaaataaacttgtactatgccattgagattttagagtttgcctgttctcgcaggtaaactagcattgtcaacactatcattatcttaatttgtatattgcatacactttagcctagaatatattaaagacatccccttatttctcattgcactgtaaaccactccaaaataaagacctagaatgagtatgcaaacataatgagtatgttctaaatattaatattttctggatttgattgaattgaatcatatcgaattggactgaaatgaaataaattgtatacaatatggtaagaaacttcagagattataatagagctttcttttatctggagaaaccacggaaggtttttagaaggtagtgtttgagcaaacacttgaaatattggtttactttggatatacagtaaagaatatgatattccagtaaaagtaaatagtgtgaacacatggcaaacatcaccaagagcagatagttcagtctgactagggttggtcagtgagaaacaaatgtctaaatttacttcagtccaaatacatttacagggcacctattctgacaggaggacaatctcatgaagaggttatttaagaaaaatatatatgttataagtaaatgtatataataaatgccatgagagcacagagaaaagatgccyaaaggagataggatgagttttggaaaacagataagttaaccacaccatacagtttgttgaaagtttcattggaayacttgcacattatcgtgtaaccaatagggagtcattgaagggctttgcagagagacttgaaagatggtcaatgagtttggacctggctgtgtaaatagctggtaaatgagcttcataggaagactctgtgcatgtctttcactacccctcaaaagtgaaagacgacatggacacagtgctgctgtaaacaggaaacataatcatgcaggaggtgtgaagaccacagcagggagcatggatggacataggagtccagttattaggccactataattggccatttaagtaatcactgagggcctttgtctaggatctgtgtctaggcagtagaaatgtgaaggaaagaatggattagagctatagcagaagtagagtcaatgtcttcactccatgggtattgaaggcaagtgtgtatcagctaggattagtttcagctatgagtgatggataagtctaaataagatggagatttatttatatcttataaatgtaggccatgcagggatcccagctctttctatcttgatgctgaaaataaggcatttgcatgatggttcaggatggctatttgaagtctagctatgatgtccacatcccggcttgctggaagaggtgaggagaggcatagcattttcttttagcacttcctggaactcttatacattttctaacatctcattaaccagaacttattcacatgtccacacctacctacaaaggagatakggctaatatagtctgtattctgtgatgtcttactaaaaccagagttttccttgttaaggaagaaggggaaataaatattgggagatttagtagcactatttttgccacaggggcagaagacagttgtgatcatgaggtcctggaaaatagcagtattctaattagtaggctgctgaaaagcttgcatggaactggaataaaaaatccaggtggggaatataaatttgagaatcatcctcattgaagtagtagctgagatagggatggtcctcaaatctcctcagatacaactctccagacaattcaagttccaaattttagtttggtcttggttatttatataatgaaactccagtttggcttgtgtggaaagcccagatatggtcataattcactggctctaccacttataagtatgtgacagcacctgtcatatagtgcatgctcagcaaatgctgtgtggatcagaatcagaatgaaggacaaaactatgttgagctatgatatacataaaaaataaatctgccctggccttttcctatggtttgcatgtggctttatgtcccaccatggcaaattgacttaataggtcattttgcctacttttctaccgggcattgggctttctctgggctttgtcccagcgaagaccacatgtttcctgcatgagttccctgaatcagtttttttcctgctgcaagtcttatattctgttccccaagtttcttcagtgactgtactttgactcacaaatgkcacgaatgtcctcagaggctctttaagtcttttttcagtcagggagggctatcttttttcttccacaagttggctcacaatttagaggagttttcttggtaactaaaaatagactaccattcaatctgcagtcacagtattgggtatctactctaaaaaagaaataattacatcagaaagataactgaattcatatgtttatagcagtactgttcacaatagcaaagatatggaatcaacataagtmtctatcaatgggtaagtgcgtaaagaaaatggggtatatccataccgtggaatactactcagccataaaaaagaatgaaatcacatcttttgcagcaacatggatggaactgaagaccattagcttaagtgaaataactcagaaacagaaagtcaaatatcacaaatacttataagtgagagctataagctataaatgtatacacatggacatagtggaataatagacattggagacttggaagggtgggagagtgagggggatgagggatgggaaattccttaaggagtataatatacccattaaggtgagggttacactaaaagcctagacttcaccactaagcaatatatctgtatttaaaaaactgcatttgtactttttaaatttatacaaataaacattttttaaaaagagatgaaataattcgcccaaagtgacacaattagtagcaaatttgtgatttaaccccagggtgcywtgtattttccatcatttcacactgcctcccaaaccaacaattctgctggatttctttcttttcgttgcatttagccttgctgaattcaagcttaagagagatacaaggagattttagtctcattcagagatttcagctgtaatagaaagttttatgtgacatgagattaaccccacaattgactgacccattgattttaggaattaccagtagtttatttccaattgtagtttaaaaatggagttattagtatgctcstagcattctgaatatagcacrtacacattttccttattgctatgatttatgggaggctgcatgaacctaggcatggacttgtactcttgggatctgaagtttcatccatctgtttaaaaacataaatacactctactacaaaaaggagctacaatatttacagagaataaatctatacctgattccaaacagataaataatagtaaaaatatggaatagatttctatgaaatgtccatctcatgagctgatgacagaacagattcattcattagactaatgatgcttcttaagttgcctatttgtcagaagtcaaaattatatttaaatggttagcattattttattatgtagttatcctgaaagtaccaccagaattttcctttgagaaataataatttatacttttgtggcaatgcagattgttataacattttttacaaagtaactcaacatatatacttctgtcccttgactgtgattttggctcactgtgctaaagaaaggtctaaaagaggatgagtgagggaagctttgtacctgagaaggttaagtgcagtattcaaacaactagataaccaatagggaaggaataattggtaaattatggcatagctactaaaataactagtatctgtacattaaaaataagaatgaaaaaacaagacgtaatgtttggtgaaagaagcaaaattatagttaccctcttaaaattacagagattagaggtaatctttttgtcccttttcttttgtgttccactattattgagttacactcttctttgaattctaaggaccttttatcattaaacttattccaaggaaatcatagagggtagtcatcagagtgaatatttctataaaacttgtaaataacatttataaatggaggttcacatgtcattctccctttcctagatttattaagcaaatatttgtcaaacactgtgccagtgtacctacgatatgtgttgcattatggaagacaaagcacaacatttttacccttgagacagctttaatttagtcagggagagagaagtaatagcaaaatatatgttaaaaatatacaaagaaagtgttgcagccatgaggagactgaagatgctcccaaattactcccttagtctccctggtcatctcagtaactgtcaacatctagtcactcagactaaaaagggtgggagttttccttgagagaagtcttcaacttctctcatccagttcattaccaagtcttatccatgcttcatctaaatcttttttttttttttttttttgagacggagtctcgctctgtcgcccaggctggagtgcagtggcgggatctcggctcactgcaagctccgcctcccaggttaacgccattctcctgcctcagcctcccaagtagctgggactacaggcgcccrccactacgcccggctaattttttgtatttttagtagagacggggtttcaccgttttagccgggatggtctcgatctcctgacctcgtgatccgcccgcctcggcctcccaaagtgctgggactacaggcgtgagccaccgcgcccggccgcttcatctaaatcttatgatgttctattttcaccagcactgccctagttgaagccaccaccacctttctcttgggccgctacttacattgtccggcctcatttttagcctgcctctcccctgtatctactattatcacacnnnnnnnnnnnnnnnnnnnnnnnnnnnnnnnnnnnnnnnnnnnnnnnnnnnnnnnnnnnnnnnnnnnnnnnnnnnnnnnnnnnnnnnnnnnnnnnnnnnnnnnnnnnnnnnnnnnnnnnnnnnnnnnnnnnnnnnnnnnnnnnnnnnnnnnnnnnnnnnnnnnnnnnnnnnnnnnnnnnnnnnnnnnnnnnnnnnnnnnnnnnnnnnnnnnnnnnnnnnnnnnnnnnnnnnnnnnnnnnnnnnnnnnnnnnnnnnnnnnnnnnnnnnnnnnnnnnnnnnnnnnnnnnnnnnnnnnnnnnnnnnnnnnnnnnnnnnnnnnnnnnnnnnnnnnnnnnnnnnnnnnnnncccacaaattacttttgcgcccacctaataacttcatggaaaacaggaactttgtaccctcaatgcttagaatacttactgacaatcataggtactcactagatgtttcttgaattaacaggaatggcaaatgaggaatagacactaaagttctgaaattcagggaagttagggattacagtagagttggaatgatcagtacacctttcttgaaaggagtgtaaattggagaggctttgagaattgagtaagaccaggtcaagaaaaagtagacaaagaaggaatttcggggggaaaaagggcagagtgaaggtgtggagagagtaataaacgtggtatacctggggacagcaggaagaatgactcttgtaaattttatgagaaatgatattaaatgtgtggtaaacccaaattgcagaaattctagaatactaggctgagaattagccataatagggactttcctcctgatgattttcaagtctagttacctttgagcttctctctatttattttaatatttatttatttatttatttatttatttatttatttatttatttatttttgagatggagtctcgctctgtcacccaggctggagtgcagtggtgcaatctcggctcactgcaagctccgcctccctggttcatgccattctcctgcctcagcctcccgagtagctgggactacaggcgccggccaccaagcccagctaattttttgtatttttggtagagacggggttttgccgtgttaaccaggatggtctctatcccctgacctcgtgatgcgcccaccttggcctcccaaagtgctgggattagtggcgtgagccactgcgcctggccttgaacttcttaaaaatagtatcatgctaagcattttagatgaaagtaatacgggctacccgccatcaatatttttttcttatctcccaacacaaatataattttgtcagcttgcttaggtctggtccaacacgcaaggtgattctaggtcatacccatcttctctctttggaaatagtcactttgtcacccattaaccagttcaattctcaatgttctgagtgtcctgtctagtttgtatggcaagtggggttttcacataggatggagagatagaaatgagtttcatcctgtcttgcgaattcaggaaaagcaaagaaagacagagatgtaaatagttccaggtatgacacatcttcccctttgcttttaaatgaaacacattgtgctaaataaaagtgggtttgctaaggctttgatttccctaggcagggtgtcagctcctggtactcttccatctgtcaagcacgtgtgggcttgtcaaccaacttgaaaccacttttgtccacattcccactgaccacaaatataggcgtcacacccacaagtctttggatagagactaaaacctcccaaggattgtgtgagctggactgcaagttggtataatatacaacttcactaccacgtttatcaggcattcacccaatatttttctggcacttattatgtactaagcttttgcataaataatggaattttttttttttttttgacggagtctcgctctgtcccccaggctggggtgcagtggtgtgatctctgctcactacaacctccgtctcccgggttgaagcgattctcctgcctcagcctcccaagtagctgggattacaggaatgtactaccacaccctgctaatttttgtttgtgtttttgttttttgagacggagtttcgctctgtcgcccaggctggagtgcagtggtgcaatctcggctcactgcaagctccgcctccccggttcacgccattctcctgtcttggcctcccgagtagctgggactacaggtgcccgccacagcgcccggctaattttttatatttttagtagagacggggtttccccgtgtgagccaggatggtctcgatctcctgacctcgtgatccgcgtgccccggcctcccagagtgctgggattacaggagtaagccaccacacccggccaaataatggaattttaaaataagatatattctctgacctcaggaaggttacggttaggtggaaatgaatgatatggaaacagatagtgtggggcactatctaaatgttagaatgtaggaccacacataatacagagagtgcacagaagaaaaataccttccgggtgttgtaaaagtcaascacctgaggaagggcattatccccgttagtctagtgagtgccatgcagctcaatggggcagtcatttatgtttcttctgacgatccatgcacttctcaatgttcctgcttcccacttagaacacaaaattggccatgcaaggaaagaagtgatgtcatggatatgcatccaatgttagaagtacttttttaccttccaacttatgttgtttcctggtcagtagacttggtaccttcctccttgaattacctcctccagtggagaaatgcaatttctgagggaaacaaccattcagggcttctaccattacattaaaatgaagtaaccatagcagtgtatgtactctgcctctcctctatatctggcttcatctttgctagttgtagaccacttggcacaggtataattgtactgacccagggcttggaagcttatttttgcaatgtatgtgcttatggtttggtatgttttgactgatggtggagttttattaagcaacatcccttccccaactggatccctttgtgagggctcttctgttccctattgcaccatttccttccctacctcaactgtgctatctcagatgttgcttttaagtcttgtttcccaccaggtcaagagaccactgtaatttccaaatggaggtatttcgcagttatgttttctctgaacctaagttagttaaattagttgacttggagcagtaagctctgttaatgatagggatctactcacaggccagatcacatcatctttgggaagttttagtctggatccaaagacttgttggtgtgatgcctgtatttgtggtcagtgggtatatgaacataattttttaagttggttggcaggcccatacttgcttgagagagtttatggacttgtgggaagaacaaaaggggatcaagatattgttcaggtctttattgactggtttgaaaaacccagcatgggttgtaggccttgtttatataaagctccaccagctttggtggtttagcccaatggaaatcgggtggagagagggaaatattcaattttatgtagatgctggtgaccaatttcagatctggaaaagatttagtatgatagataccttctgcagtacatactgatcagatatcaggcacatgtaattagaaacccatatatttcaacattctgattttttttttttttttgtaaagtagctcacttctgaacatttaagtaagaaacagaactggataacaaaaatcttttagatccaagacagaactgagcaaactatggcctacagatcaaatccagctctttgttttcataaataaaattgtactggcacacagctacacccctgcatattgtatacagctgtttttgtgctacaatggcaaagtggagcagttggcacagaaatagtatgggcttcaaagcctaaaacatgtattatgtcgccctttatggaaaaaatttgctgacctctgttttaagaccccaacctcttacaagtgaggttcccttctctgtgcaagaagggatcaccaaaagcctctgttccatccagaaagttgcaaaacactttgctctttcttcatccccaacgatgacttcttcagctatcccattcattcagaagtagaattatgtaagataattctgctcacttgtataagaagccattggagcaatgaacattgtctctcaaaattctgagattcagagtttcctttggaaaatcatcagttctcaaactgccacagtgaaaaataaaccaagaataaaactgaaatagatttttccttgctatgtatatcttttcctctggcagtgatgacaatttttattgtcaacacaatttttttaattagacacctggatttttcccaggggctggttgcacattaaaaaattctgatccatacctaggcaaagaggagcatagaatgctgtaaaagctcaggcggctctctgttcacctgtttgctctgaggaattctcaatcagctcttcactcacttcaaatcacatgtaaacaacaacaagatgactaccaaggatctggtgggaggcgttaaaataagaatcctgtatttctctaggagatccatctataataaacttcttgtagtactgtggcagaactttaagtgaggtacctttttaaatgtgccatcctgtctttctaaattaccaaacagtatgaggccagcctgagcatccaagggaatttgaaaacattacataaatcatctttattttcttctagtctgcagccattaaattttgtaattgatagacatcaaatgggctcttccagctgattgatttttggagggtgaatktggttcttcacaatgcacatcaaagacagctaacaggagctctgcagttctactattacaataggctttattcagatggtctgattgtcttattacctgctaaaatcttacatagttctgcttctgaatggatgtgatagccaaagaagcaatgattggagatgaagaaagagcaaagtgttttgcaactttctggatggaacagaagcttttggtgataatcttgtcagtgccaatactcttacttacccaggggcttctttcttcttccttctagatagatgtttcttaaattgatatttcagttcgactgataggttgtccttagaggggagtgtggaagatatgcacatgtaagaagagagataaaaagagggactaggaatgcatctaaaaatctgagaacctagtcatcttactcaggttttattagagttagctttcccttttttgccgtcttgacaacatgcatgtatgctttctcttttttccttactgctttatcccttgtagaaatgaaagtttcttaatgatatggtcaaatggcaggaaagagtagaaaaaatatttgaacatataatggggtaatggggtggcaaatgtattccatatgacactacaattcagatagatggggaaagatgtatcttttgtctacttagacaaagcgctatcctctagtgttcaacataatgtttcattttatcctcttttagcacatgtaagtactataaatagcacctttaggtcagtgactgtcaatagggatgtcaccgtttctgggggaatattttggaaatgggtgagggcacttaagattgttataatgaaagagtggcaattagcaacaactaaagggggacagagatgctatgctctgcaacatattagatagttagaaacaacgataaattatcccatgtcccaacagacattcaagtgattggaaaaactgttttatttatttgaccctccaatcaaactccattttgcatatacacacaaagcatgtcttacaaagttttattatacctggttctttagcaatgcaaagatcatgtaaatcaagagaaggtggtacttaattgtgttctaatctttcccaagagttcactattttggaaaaccacataccattgagagaaatgccacttgtggattctggaatctctaatataatatgaagttgttatttgtgtctgtgttaattaagcatccaacttcttcattttatcttcttctagtgcaccatgcccaggtatttacatattgaaatatataatattttgttttacattatgttccttgtatttcccccttgtattatagttaaagcactatattgattatattgattgtttttccttttgaaattatgtatgtaaattagcactcaacaaattttttcagtaaagagccatggaggaaacattttaggctttgtgggccaaatggtctctgtcataactattccactctgccattgtagtgagaaagcaactctagagactatgtaaataaatatgtttggctatttggcaataaaacattatggacactgaaatttgaatgtaatataattttaacatgtcaaaacatttttttcaacccttttttttcaaccatttaaaaatgtaaattcatttttagctcttgtgcagtacagaaacaggcaatgggccatatttggctagcaggcacaagttttccaatctctgttctagtgtatcatactcaagcattttcacattgaaatatatattattataaattacatttcttttatttatagttaaagcactacattaaatttttaaagtgatgtgtaaacactgtaaaaatttttttgtaaaataattaggtaaaaagcttaatgtaaaacaaaawttgagtgctaagtgtatatttatttggggtaatgaaacacatgcaagataatgcagcttccccaatgactgtctcgtagaataaagagagaaggctggatttatggtttaaattgtttgatgacagtcagtaatcctgactggataaaacttggtgtgagtttttataaaactctgaagtttttgcctgttrtaaggaaaaccagtcctggcttatctctgatgcaaaactgttaggtgatgtttatagttcaatgcttttaagatcttagaaacatgcatttttcccaggcttgagacattttacatgtctagcagagctaggctgaagtttagagaattatcaggtttggggtttggttttcttgttgttgttttttagtaggttgtactgtccgtgaattttatttaattatactcaaggtgagcattacaaagtagttgtttcataagagggccattagatatctgatctcacaggtttctaagcctttgggattctcctctggctcctatgatgactgtctaacgaattgggggagaaggagggtgagtcaggcaataccaagacccagaggaagaatcagaaccctttctgaactctagagaaatgttgtctacccacttggggaattttgcagccatatccaaaccttgatttggtttcttggcttggtcgggtctaaagacctcctggctgacttcaaatctccttgtctttccctggtgctgcaaattcccagagtctcagttgaatcttccgcctgactccctggttggacagaacctttctggcttctgctttgaggtgacttcctcctttgcctgctgtcccagagcagatgcattggcttccaactcagctgacctcgggatcttcctcaagggctatggaaatgtctgaactctatccacaccacaggggcaataagaataccaggaaatccaggatacttttgtgtgtccatgcctgagatttgtgctgggcaaatttaaaggtgttattttttccagagtcttaaataagctctttgtctctcttytatttgtttttaaagtcccctaagcccactgtcagttccagaaggagtgggcttcagtttcactcatcctatgtcagaaaatctccttcaaccacaaagatacaagcctcagggctcttaatatcataggaagaaaaagtatcttcactatactataagaagagacttgaagctaaacagtccaagcttatctggaaactagagaaatctagtaaatcttctctctatacaaagccttgcattcaaacccattgtcttatacccattctttctaactcagaatgatgagtcttttccctagaactttgaagaggaaggctggaaaaaaacccccaccagatttaaagaagaaaagaaaaaagttaagatttaacattaatagtagccaaattacaaatatgattgattcacttattttcttccaatgtgtctgggaattgaaatatgaatgtagtttaataaagggataagcataaatttatgtatcatgtatactttggggtttgtgtgcatgtgtaatggcattgccccaattcacttgtcaactgtcatgaattcaagggtttccctgaggtcatgtcagcatragcttacagatctccacgatattttccaatatcttgagccctctgccctttttgcctgtgatgtcaaaaacctccaccacagttatttatattcttgttttcattttcctgggacctaaggaaagctggctgggtatacctttcagccttccagactggctccctcagcaaacttcaatctctcccaaaacaagggttccatggacatacatggatgggatctgcctactgtctcctcagtttcagcaggagcactgtgtgtgtgttgtgtgtgtgtgtgtgtgtgtgtgtgtgtgtgtgtgtgtgtgtatggggaagatgatgaggacaggtagcaggggacttaaatacataattactatctctttaacatcaattaaaatatcagagaactttcaataaaaatgtttttatatttaccgatcaatgatctatttgaaaaaaaaaaagggaagggagaaggaaggttctgttgtagtatgactttggggtagaaaagggttattttatggatattcacccttcttactcggacagccgggacacagtgcttctctgctatcatcttaatctctcttctttgcttttcctttagctcaacagaattcaccaaaaatccatgaaggctggtgggcatacaaggaggtggtccagggaagctttgttccaggtaagtacacattaattctttaatttatttattaaaaacaattagaatgaaggctagcattatttccaggattttacattgcaaaaggtgaggcagtctaatttatgtgtgcaatgaatactccatcaagacaaagtttgttaagtaacaggcaattagattacttttttttccatctgagcctgcagtctcaatgtccttcaatctataggatgccctcaggggcagggggatggatgattaagggccgaagctgtgtctgctgacatttggttaagtaaggaagagccatttcttaacattaatgaaacaggaactatgaaaagactgaccatggcaatggagctgctggaacacatgctgtcactttagcagcatccatggccagcacttagcacatcgcgccaagtatcagctaaaaataccaggtaaagtggatcttgtcagcatgcgggcagaggacagagaactgaatacagattaaagcaaggattatattatgactttcgttcagaagcaaggtggagggtccctgtgtctcctcccactactcttaccctcattatggtcctcttgcttttaatggtcctcttgcttttgctgctttagtaaagcgaggcaagagaaaaagcaagcaaaaggcaaggatagaagggaaggcaggtgacatatttcaaagtatttttaactgctcagatgtgagaataagaaataaagctctcagcaggagccagtgtgcaatctctactccggcactgaaagcagagggctggagatgtcagttgaggtctctgtagttggtggcaaatagaaagagcagagtcccaggtcacctcattcattcttggcttctatgtcttcttttcctgtccttctgtagagtctattacaccagctgtgcagagctaagcaagtcacaaaacccctctgagcatcattttttctcatttgtatgatggggcaattataagtactcgtgaggctttgcagttggaggaaagcaggcatggtaagggagagtgggtgacccaggaaaaagccaactggctgccaaatagcctcagaaatgaatattattaacttcataaatttactatggcacatctattctatggcccagtgaacatagaaaccgaacttgattaattcatctagaaatgaccaggtttctaatgatataacaatttcattggcacaagctatgttcatgtgaaacaatattgacaaatggcattcaatacttacaattgaggatgtcccttttaaagaaatagaatgtttacatacttttttcctaggaaatctgttatattcaagatatctcagaagttacatttataattatattcttgtaccttttgagtatggaattagagaaataaagggtattctctccaggtaataagaagtcttgctaagttagtacaacctgtaaagagaacatcctctgtagtgattgacatgcccatgggtagaactgggtggtcactgcaaaatgttgtgtgtctgcctcacatttttcgatgtttttttctctgttgtcacattctttctttaaagtgttcaaggccctattttgagttggttgttgcttctaagacaaccacaggaaataatttttattgtccccttacatgttgatataaaataacttttcctcactctcaaatttaattgagataatatatgtaaaccttactacatgggaagcagtaacgtgtgcaagtgtgatcatggcctctgaagtcagagttgatgggacttgagtctgggttctgtggtttcttgttggtaggactgtcagcaagttacctacccagctcagctccctgggttcttcatctgtaaaatggagataaggactaaatcagccttgtgaggtttgctgaggattaaattgcataatggaggtaatgtgtgtatgttcatgtctggtgcatgttgagtcagtatatgtcaattgttggtatctgcttgagaagagggagacaattacaaactggatagtgtaataatgtgtgtaagggtttctcaagatgcctgaaacatgggggatgcttgaatttataaggtcaagggtttctacacagtggacaactaaaagatgacttcctcatcctctgaatttaacaggtctaaagccttttgtctttctggtagagaagattggtatctgatgattccactttctaaacttttgggaactccaactctgttgaaaaggataagagtcatgagaatttgtggattaagcaactgaacctggggctctaacatctgactccagatgacctactttatctgagtgggtacytgtggcaaacaatggaccccttacctcttattacttgactataaagttaagagtgttcttcaatttgttactgagatttttttcaggttatggatgtgtgaaataggagagaacttgatatgactgaactagttttatcgtcccataagttcctcactgaagtgtctagaaataatagtcagttggcataacagttgtgaatctgtgacttcaacaaagctgtggtggataaaaatatatgagctctataacaatggtgagtacaaggttaattcagcacgcaaatgccccactttggtcagttcaatagcatttatggagtacctaccttgtgctgagcaccaagtttgggcggttaataaacaggtaactcacacatgattcttactcaaaggtgagcctacagtctaaagaggaagataagccataaatccatgactcagggtaacaagggctccaacagggtttatacatgtaaaggaggcaacacagtattgggattctgcctgcctaagtgtttaacagatgttgtttacctgctcaaacctatgccttcctctgaccttacccacaactagagtctgtcttgcaggcagagccctgactatgcttgcacattcgccctccataccatcatatactcagggaaggagccccttaccagccccagagggttactcttggctgagatttataccaacaatggtgattctggtctctttcttctcagtaattggtttagacattgtgatggctaatttgatgtgtccatttggctaggtacstacccagatattagaccaaacatgcctggatgttgttgggcaggtactttttaagaccagattaacatttgcatcagtaaactttgagtaaagcagattatctgtataatatgtgtgggccttatccaatgagttgaaggccttaagagaaaaagaccaakgtccccaaagaaaaagggagttctgcctccagaagccttaggccaggagcagcaatatcaacatttccctaggcctcctgcctatcggcttacgctgtagacatcatccttgccagccatcatgtgagccaatttcttaaataaatctctcactgtcaccccattctgttgattctctttctcaggagaacccagagtaatacattaatatagtcatgcatatgtgataaacagttctattcatgccatgtaaggagaagccttctgaataaacttgggtacaaaagacacactaagatggcaaaatggagagttgagaaaaacccrtatcttctatggctcacttaagggttgaattcaccatggaactgcctcaccacttattgtgttaagtgacgtaacaaacttcttactgcttgagccactttgagtcagactttctgtcacttgcagcctaaagcagtcttccagggccaggcatctcactacaaggctaaaggaagaaaggaagttagaactgggtcttgacaaggttcaggagtactcaaagtggagaagggtggtaatgtgaggaatacttgacagcacaggcaaagagggattgtattagtccattttcatactgctttaaagaactgcctgagaccgggtaacttataaaggaaagaggtttaattgactcacagttaagtatggccgggaggcctcaggaaacttacaattatggcagaaggcaaagggaaagcaagataccttctttacaaggctgcaggaaggaaaagtgctgagtgaagggggaagagccccttacaaaaccatcagaccttgtaagaacttactatcatgagaacagcatgggagaaaccaccccaagatccaattacttcacctggtctctcctttgaaatgtggrtattatggggattataattcaaaatgagatttaggtggggacacaaagcctaaacctaccgtaccactttgggtccctcccaatcctcatgtctctgacatttcaaaaccaatcctgcctacccaactgtcctgcaaagtcttaactcatttcagcattaactcaaaagtccacagtccaaagtctcatctaagacaaggccagccccttctgcctatgagcctgtaaaatcaaaagcaacttagttacttcctggatacaatgcaggtacaggcattgggtaaatagagccattccaaatgggagaaactggccaaaacaaatgggctacaagccccatgcaagtccaaaatccagcaaggcagtgaaatcttaaaggtccataatgatctcctttgactctgtgtatcacatccaggtcatgctgatgcaagaggtgggtagctctgcccctgtggctttgcaaggtacagtccacctcccagctgctttcacaggctggcattgagtgtccacagctttgccaggtgcatgttgcaagctattggtggatctaccattctggggtcaggaggatcttggtccttttctcacagctccactaggcagtgccccagtggggactctgtaggagttcgcaccccgcatttcccttccacactgccctagcagagtttctccatgagggctccccactgcagcaaacttctgcctggacattcaggtgtttccctacgtcatccaaaatctgggcagaggttcctaaacttcagttcttggcttctgtgcacccacaggcccaacaccacatgtaagccaccaaggcctggggcttgcaccctttgaagcaacagcatgagctatatgttggccctttttggccacagctggaatgcagggcaccaagcccagagactgcacaaagcagctaggccttgggcccagcccaggaaactactttctcttccaggcctctgggcatgtgatgggagggctgctgtaaagacctttgacatgccctggagacattttccccattgtcttggctattaaaatttggctccttatgcaaatctctgcagccagcttgaatttctcctcagaaaatgggtttttcttttctatcacatcatcaggctgcaaactttccaaacttttatgctctgcttcccttttaaacataagttccaatatcaaaccatctctttatgaatgtataaaattgaatacttttaagagcacccaagtcacatcttgaatggttttctgcttagaaatttcttctgccagataccctacatcatttctcttaagttcaaagctccacagatctctggggtggagcaaaatgccaccagtctccttgctaaagcatagcaagagtcacctttatacccgtttccaacaagtttttttatcttcatctgtgttaatctgttctcatgctgctaataaggacatacccaagactgggtaatttataaaggaaagaggtttaattgactcacagttccacatgactgagaaggtctcataatcatggctgaaggtgaaggagaagcaaagtcaygtcttacatgrcagcaggcaaaagagcttgtgcagrggaactcccgtctataaaaccatcagatctcatgagactcattcactacaagaacagtatggtggaaactgcacccatgattcaattatctccacctggccctgccgttgacatgtggagattattacaattcaaggtgagatttgggtggggacccagccaaaccgtatcaccatctgagaccaccttagcctgctgtatttcattgtccatatcactatcagtattttgatcaaagccattcaacaagtctctaggaagttcccacatctttctgtcttcttctaagccctccaaaccattccaacctctgcctgttacccagttccaaagtcactttcacattttgggtatctttagagcagcaccccattctctgtgataccaatttactctattagtccgttttcatactgctataaagaactgcctgagactggttaatttataaagatatcaagtttaattgactcatagttcagcatggctggggaggcctcatgaaacttacaatcgtgttggaagaggaagcaagtcaccttcacagggcagcaggaaggagaagagctgagtgaaggaacaactggatgcgatgaaaactcactcactgtcaagagaacwgcatgggagtaactgtccacatgattcaattatgtcccaccaggtccctcctacaacatatggggattatgtgaactacaattcaagatgagatttggctgggggcacagccaaaccatatcaatgggcaaaagcctggaagcttggaagagaatgttcactagtgcaagaagagctctgggaattaaggccttggagagcagcaggggcctgattatggagggccataccaactgggagtttggattttaccygaaaggaactagaagtttggattttaccctaaagaatcaaaggagagrttgaaactcttacagaattcaaagtcagagaagagggccatatgagctaagataggagcagtgaggggcctagggatggttcagcttctagagttagggaccttatctcttcccaccacctattcctcsaggatatacctcaggccttccatgcaccaggggctcaatgtttgccaaacaaacttgggtcagaatagacagcartattccttaaagaaaaagacaaaggcttgactcgggagacagagtgaarggctgttcctcaacccttaaattgagttataaaataataatagtaacaaacacatcagtacaatctgtagtacatgctataaatggaaagtactcaaggttttaaaaagcctagtagaaatagtctggagatcaaggagagcctccttgtgtaatctaggagaagctaagctaaggaaggacgttgctagtgcagagtcatcttagaccagctgtttaaggcagaagcatgagcctcaagcgtgggcatgacatgtatgagaaatggaacaaaggtcactgtggccagagtgcaaagtgacaagtgcaaartggttggagattggggtggtcaggggccagctcatagagggccttgtgggccacataaagtatttggatggagatcctggaaataaaggacaatagatagttttaagcactttactcttcctctgagatctgggaagcaggaatttctgaggaattagatcaccacttattcagcagcttaaaatcataatacagaattcctctgaatgattaatagaggaactcattgctgccatttctgatcagcattggacctagcaggctactttggctcaggacagcatcatctgttgcattctttaaaattgggtacaaatggtttacccaggtcaataaccctcccagcttgctattttccatccttttctttttgggtagttttaaaatctaaagattattggacaaggaaggtaattatacccaaccacctacaagttaccactgatgtctaattgtttatcaaaatgtccactttaaaaaaaaaaaagtctcatgattaacaggtaaggagtgtaagctcttctttcttcacagtactcccaggaaagaaatctggctggttggtgagggttacttgctgatccaggatggccagcctggggctgtgcatgctcttcattccttaattcatggagtaagtggtacctgccttgattttttggttgctacttaagaattaccatttatttagtagtttaaaatgacacacatttgttatttcacagtttccttgggtcagaagtctggacatggcttaaatggatcctctactgagtcccataaggctgaaaaaggtgtcattctggctgcattctcatctgaagtcaagctcatgygggtccttggcagaattcaattccatgcagttgtagggctgagacccttgtctcctatggcctgccactgctgaataagcagttcacaacacagtttgcatcttcaaggttggcaggaaagtgcctyacttactttaaatctcccyatcctgagaaggcctagactctcttttaaaggtcaagcctattcagtataacatgcctttttattaactgaaagtcaacggattaagaacgttattcacatctgcaaaatctgttcatctttgccagaaatggcagtctactcaaggaagtgaaattccattatactcagaaatctcactcatactagagggtgtgtacactatgaggtaggaatgttgggggctgtcttattccatttgtgtttccgtaaatgaatacctgaggctggataattcataaagarttttgagataaagagattcatttggctcatgattctacaggctggtgtacaagaagcatggyaccagcatctgcatctggtgagggcctcaggctgtttctactcatagtgcaagtggaaggggaggcagcatgtacaaagatcacatggtgagagaggaagcaagagatacagagaaattgccaggttctttttaacaagctcttacaggaaccaatagagcaataacttgctcattactatraaggtggtaccaagccattcayaagggatctgcctctatgacccaaacacctctcattagaccccacctgcaacattgcgaatcaaatttcaacatgaggtttgaagggtcagatattcaaactgtagcattccacgcttgactctccatgcctcacatccttctcacattgcaaaatacaatcattctatcccaatggtcccgaaagtcttaacttgttctagcatctactcaaaagtcccaaatccaaaatctcatctgagactcaaggcaagttccttccacctatgagcctgtgaaatcaaaagcaattcatctacttataatatgcaatgtttgtataggcattaggtaaacattctcgttcacaaagacaaaaattggccaaaagaaaggggtaagcagtcttcatggaagtctaaaacccagcagggcagacattaaatcttaaagctccaaaataatcttctttgacccatgtcctgcatcctgggcatactgatatgagaagtgggctcccaagtccttggaaagccctgcccccacagtttttctgggtgcagcccacattgctgcttttacagtttggaatctaatacctgcagcatttccatgctagtgtggctcattgccagtggctatataattctggtgtctgaagtgtggtgctcctgttcccacagctcccctgggcactgccctagtagaggctccctgtaggagctccttccctgcagaaggcttctgcctgggcacccaggctttccaatacatcctctgaaatctacaggcttggcagcttccacygctcttgcattctaggagcctacagacttagcaccaagtggatgctgctgagatttatggcttgcaccctctggagcaccagctgaaatagtatgtggggttatttgtgcctcacctggagctggagcagcttgaatgttgagaaagcatatcaaagtggcttcggggtaactcgggcctgttccctgaaaccattttgttttcccaggcctgtgggcctatgatgggagggggctacaaagatttctgaaaaacctttttccaatttttttgactctttgcacctgactcccttttatccattttaatctctttaacaagtggttacccctcagcaccactggatttttctcctgaaaacattctttcctttcctgtcacattgctagactgtaaatttttcatgtttttatattctgctttccttttaattacaaattccacctttaggtaattcctttgctgccatatcttactgtaagctgttaaaagtagccacaccttagccagggatggtggtgggtgcctgtaatcccagctacttgggaggctggggcataagaatcacttgaacctgggaggcgaaggttgctgtgagccaagattgtgccactgcactccagcctgagcaacaaagcatgactccatctcaaaaaaaaaaaaaaaaaaaaagtggccacaccacttcttgaaagctttgctttgcggcatatagtgaatttatgaggttttctccctcagaaattcagtatgtgaccaccccttccaagagacccacattcagtctccctttgataagccagtaagtttatccttcaatacatcccaattaagtgatagttaaagtaattgtattagtttcctatagctccatgtgctagtcctttttcacactgctataaggatactacccaagactgggtaatttataaacagaggaggtttaattgactcacagttccacatgcctggggaggcctcaagaaactcacaatcatggcggaaggtgaatgggaagcaaacaccttcttcacatggaggaaggagagagaagaagccagcaagagaggaaccagtgaacacttacaaaaccatgagatttcatgagaactcactatcatgagaacaacatgtggggaaactgcccccatgatccaatcacctcccactaggtctctcaacacctggtaattacaatttaagatgagatttgggtggggatacaaaggctaaccatatcagtcttataacaaattaccctaaagttagtagctagaaacaacagatttattatcttaccattttaaaagttggacacactaaaatcaaggtgtcactagggcagcctgcattatggaggctctgaggagaaatcaatcccttgccttctccaccttctagaagccacctgcattactcagtgcagggtcccttccttgcatggctccagcctgtgcttctgttatcacatatctttctctaactctgacccttctgcctcccacttttcagaatgtttgtgattgcatttggcccatctggataatctaggatgatctccccatcgtaagatccttsacataatcatatctgcaaaatatattttgccatataaggtaacacattcacaggtttggtggattagaatatggacattttgggaagaccattattctttttttcatacttacattatctccaaagctaatggaagcacaattaacccatcacatgaacatatgattttrtagttgtcagtactggtttactcatgttacttcattcatcccttacaaaatttgcactcatactcccctttttccagatgagaaaacaaagcaaattagataaagttactatctaaatttccaatgcaggtcaacgtagaagcaggtttataaataagcacatttctaatccaatgctctttccactacaaatatgtataaatttgattaacaggtgatacttcttggatagacaatagtactrttctgcttatcttctagaaaaaaatgaactacaggcaaaaataaaaggctatatgccagattaatccactgaaaacwcaacacaaatctatcttctctctagacatgatctagcatttggatatcatttattacattttagaaagcctttccaggtgtcatctttcaaaataatttttttattttgggatgactttagatttacagaaaagttatacagggagtttccatatactctttatccaaggtccctaatttaatgccttacattagcaatacatttgtcaaaactaagaaaccaacctggatacattactggtaaactaaactccagatttttttttaatatccgagtttttccactaaggtcctgtttctgttgcataatccaatttaggataccatattacatttagccttcatgtctctttcgtctcctctgggctgtgaaagtttctgaatcttttgatttttcatgactgacagttttgagaaatactggtgagctactttgtataaaattcctgaatttctgtgtgtttgatgcttttcttggttaatctgggattgtgagttttggggaaaggttccctggagatagagttccatttgcattacatcctatcagagggtacgtgatatcaacatgtgtttgtctcatttgtgacaacttataaaaagacacgtatttctatcaccaatcagtaaatgtggaagattcaacaaggctagagattgatctttagttgtagaacaaatgaatgatggagttggacctagaaccagatcacttgcattaacaggtagtatttctcgaattggactgtactccaaagcccctcctgatgtcttactttatgacatcaattgttttgctacaaaattgtatgtaaaccttygtgtttgagagtagaattttgtttcaagttatcttaagaataaaacttgcattttaatgagccctgtggcatattgaataactctctccattggaggtagtcagtcattaactgtgtaaggtcatatttcagccattgagttttctttyttttttttctttagcactttttttttattatactttaagttctagggtacatgtgcacaatgtgcagttttgatacatatgtatacatgtgccatgttggtgggctgcacctgttaacttgtcatttacatttgatagatcttctaattcagccattgaattttcttgggcagggagtgtgtgtgtgggtgagcacaccagtattttgtgcccccggactttttgttatcaattgtcttcctcctttggataatagatgcagcaacgggttctggaaaatgctcagtggcttgtgtcttccactgaccaaacatgagatcttaggcaagtcacttagcatatcaggagcttgttttcctcacctatagaatcagggtattgagctgcatggtttccaaagaaccattccagctctgatatttttttgtgagcttgctaagattggtttggaagttatagttagcagcaytaaggaatagaatattgatttcatccacaggataattttattatgttctcaatatcagtgtttgtaagtggaggcagtgatgcaagtctctctctctwgatttctgatttttcatctctaagaggaagcaagcagaatttaatggatatattctctcagtatgagagggtgatgttacactgactcaccctcaattagaaatactttgttatttcttttccccaaaaatggggatgcatagtgtgtaaaatttactcagagcctgatgtgccagacactctgctagacactaggtatacaaatcagaataaatgacagctcctgatcttaagagctcgcagttgagtttagagacagacatgcaaattaagagttacagtttagcctaataaggcatgtgagacatgagtggtgggatccacacatgtggattggctgcagaaaaaagaaaacaactaaccctacctttggggtcagaaaaggctttgcagatgaaggcttctcttgacatagggcttaaaagatgaataggcatctgccaggtatgcaagatggaaaagatcattgctggtggattaaacatagtgaaatctgaactgctacttaataacagattgaaaacttcatgtaaccagtaagcagtcctatttatcatttcatttatgagagtccctattattaccacacttcagagctgcacggcagaaagcccactggacttagaaggtcatgctttggatcccactccattgtgttccaaccatttgatggacaataatgtttgaaaatcacctaatgtctcagagcctcagtttactcatttgtaaaatacagacaataagacaatgagaaatgtgtctcaaacatttttgtaaaaataaaattttgtattagagttagtcctgcatcatagactatgaaagtatacaaagatattacgatttttattattataattttgctttaggctatttaaagttgyataaaagcaacctgatcaattgtaccattactgagttcctgatccttctgagttccatctgatccagggaggcacgtgtaaggcttttcagtatktgccaactacagcgtattgtacttaaagacactacctcatgtaagtgtatataaacctgcatatatatttcagcactgagagggtttgggtcacgttgcagccatccaatatgaagtactcctgttggataggcttttgtaccaatccttctcagaggttcatggctttcctagtcacaccaggaaatttctggccaatcaacacaagtggttctagctaatcaacctcttgagaaacactttggaacttcaggatctacacagtcagaagtgcacaaaggaaggaacatagggagtgttccatgctgggtgcaggcagtaacagcgtgcattgtctggagagaatttaataataataatgaaacccaccaaatgacctgctttttattatccccaggtgctggaaattgtaaaaatgccagtgataaaatactccacttcgaaaaaccttttgtgggtctaagctctaaacaattgctgtagttactgttgagttttaacaatacaatttacccttgagcaatgtggtgattagggatgctgacccccatgccgccaaaaatccatgtataactttgactcccccaaaactcaactactaagagcctatggttgaccggaagccttactgataacaaatagttcatcaacacgtattttatatatttattaaatactgtattcttacaataaacaaanagaaaataaaatgttattaagaaagtcataaggaaaagaaaatagatttactgttcattatgtggaagtggatcataataaagatcttcatccttgtcttcatgttgagtaggctgaggaggagggaaaagaggaagggttggttatgctgtttcagtggtggcagaggcagaagaggtagatagatggggaagcaggatgggcaggcaccctcagtgtaacttattgaaaataatctgtgtataagtcgacctacgtagctcacaccccatgttgttcaagggtcaattgcatgtttttgttactgattctctactatgcactgtattttacatagaatttgatgggggaaactctaattattcagttagcctccaacacagaggcattcagctacatgagttttgttccaagagaacatttcaaagggttccagattggtggagctactgtaggccaagtcgtgtctctaatcgctgttgtaccacatattcctgaatttcagcagttcatataaaataaacaatagcactatgattgtaaacacaaagaacagagcttgaattacatcaactatatcattctgtgtgactatttagagcttttatttgtacttgaaatcagatatagctttactgaagagcagtttagttatctgttgatactttgtaagggtragtagtgctcactgggtggttgtatgataatgggattgtttacagaatacacagcaggatgctttaacctcaggttattcctttttgtcaagcagaagaaaatcaaagacaggaagactataactcccaaccaggaattctacttcttataactgcaaaagcatgacagggatatgcctgtggacacttataaaatgtagtttctataacagtcttaaaaaagataaactatatagcaaaggcttttatgcagcaagtatccagcatgggatgctcttactttgaaaatttcacaacactagcaagccagctcctctttcccagcccagcctcagttgaaggacccgttttgatgatcatggctgaggttagggggcttctttctccccaccaacccgcttcatgacttcttatgaatagackccatggtgacttatgatttttgcattccaattccaaaytgccctgcaagctgccttcttccctcactgaacagaattgggtcatcacttcctgccaaatgcccttgtcgcctttccaatcaccaatcaccagtgastctcattttggacacctcctcttcctttctggaagagtgcatatttmtagatttgagggttcctttgcagcccgctgtgcctgctcttcctcatgtcacctcctaaaaggtagacttccagagcctcttcatctgccatctcctcttctcacagcttccatcagtggtcacctgctttatgtgaactactacaaaatctcccaccctagttccagtcacttcccagttacaacctcatattccaagaatttggtcagctttacctccccatgtgatcacctgaaattcacagggtgtagctaatatcaattataaatacttttatgctttatttgaggctatctgccttattcttagagatatgatgggtttcccctgaaggatctttctaacactatatcagttgcccagaattatgcctcatttaaaagagttttatattcagacactgccattcttgcatttatttttactaggaaaatattacctttttatggctaattgggagaaaataacccttcatctcatcwgtctgaaacggtatcagtaatatattattataggactttttataatatatcacacaataatatatcagtttcacaatacatttacagtcttgatttttaatcaggaatttggtgttatgacaactactttttcttgaatacattcttggagcctccaacatgctgttctaatatcaactgatggctttctaaccttgttttcagatatcacactaaatttgttttactgcctagattatttctattctttctcacatattgtggtatatatttaaattcactttatagttttggaaactccatatttaagttttgctttgtttttttttttttttcaccagaaggatatatgagtgatgagttttctgagtcctcaggtgtccaataaaaggtttgtcttcaccctcacactttactgacagttcatctggtaataaaattctagtgtcaaaattaccttctttccttaagatagtcctaggtgttactctattgccagcttgcaaagagtctcagataagtctaatgcttttgtagataaatgttccctaccagaccaggccttactggcttttttaggatatcatctttattcctgaagttcaaaaatgtcactgggatatatctaagtgtatatgtttgttaattatttgtgggaggcagagatttcttttcctgttttgtttcctgatctgtaaatgctaagaacaatgcctggcaaaaagtaagagctcastaaatcttatcgactaaatgaatattcaagtcacttcctagaaaaattttcttctattatttctttgattatcttctcccatctgttacccctactctctcattctggatagkttttgcaacacatgggtctttaatgcctttttttctttccatttataatttccatatctatcgggggaaattcacccccgatatttcacgtaagttcttttctattttccctaagtgttggccagtctgagaaataagggaaagagtacaaaagagagaaattttaaagctgggtgtctggggkagacatcacatgtcggcaggttccgtgatgccccccaagccgcaaaaccagcaagtttttgttagtgattttcaaaaggggagggagtgtacaattagggtatgggtcacagagatcacatgttttacaaggtaacaaaatatcacaaggtaaatggaggcagggtgagatcacaggaccacaggaccagggcgaaattaaaattgctaatgaagtttcgggcaygcattgtcattgataacatcttatcaggagacagagtttgaaagcagacaaccagtcttaccaaaatttattaggcgggaatttcctcatcctaataagcctgggagtgctacaggagactggggcttatttcatcccttatgtacgaccgtaaaagacagctgtccccaaagtggccatttcagaggcctccccttagggacacattctctttctcagggatgttccttgctgagaaaaagaattcagcgatatttctcctatttgcttttgaaagaagagaaatatgactcygttccgcctggctcacaggcagccagagtttaaggttatctcccttgttccctgaacattgctgttatcctgttcttttttcgaggtgcccagatttcatattgttcaaacacacatgctctacaaacaatttgtgcagttaatgcaatcatcacagggtcctgaggtgacatacatcctcctcagtttatgaagctgacgggattaagagattaaagacaggcataggaaatcacaagggtattgattggggaagtgataagtgtccatgaaatcttcacaatttatgttcagagattgcagtaaagatgggcatgagaaattataaaagtattaatttggggaactaakaaatgtccatgaaatcttcacaatttatgttcttctgccatggcttcagctggtccctccattcggggtccctgacttcccgcaacatgtatcctttctgtgcactcaatttctatctctgcctttttatgttaatttttagatttcctttcttatcttccatatttcttctttggctttcagcaatgtccattcttttgtacaggacttctgttaccttcttaaattttgacaattatatcttaatttccaaaaacttttcattttttctatttatccgtttgagtattttcttattttatagacatattagtttgctaaattcttgcaagtatactgattgaactttttaaaagttttcttttgttttttatgttacctttctttgttaatcttggttcttctctctcatgctattgatttccctcagatgtctggttatgtttatctatttgttcctgttttaaacaaagagctcagttggtattggaagctggtatgatttcctctgcagttacacctgtgcctatgatagccccctacttttaatgagagggttagaaatggagacaatgctgatttcaccatcttccttcaagatataggagcagaggataaagagacaagttggtgaaatctatttctaaagtaaggaaaacattaggaagtgatatgtatggttgcattttagtcctctaaagaattgtccttattttttcatttctgtgtcagctgtgtggttctgaagttaccttggtttggtctgcttctctctggccccaggcacatagtaggaagccaccacacacacacacatcactcacactcacacacactctctctctcacacacacacatactcatacacactgtattgctttactggaaggccctttacacggtttcaatatgggagcaaatgccatatccaaacttagcattaatatgcaaaggaggagaaggaaaagcagccaaggctttcataggttgtactctagttattgccctatgtaagctgcttctgctccgagtacttttgtcagcaggtttaacctttatctaaggagccagtgagaatttaggaagaaaagctattatactacaaggagcttattctcagtcctagttatttatttattattttattaaatctgatcctattcacttgatatcttctgaaaactcctcaaaattcctggtcttacaagtaccacttgttcatatttattgaagttgttwtgtattcatttcttttctartatcttttctgtaataacatgtgggaagcatgcatggaggagacagtaaatatgtgtgccctgaatgataataagccaaaactaagtgagtcctcttttcataccaaactggtttatccttcttaactccattgtttcaatgccttgccaggtctgagaggcaaaagtcaatggctactcatcagggttggtgaatgcctgtctttttttttttttwaaaaaaaaaaagccttttaagttcaggggtacaagtgcaggtttgtttgttacctaggtaaacttatgtcatggggggttgttgttcagattatttaatcacccgggtattaagcctagtacccattacttatttttcctgatccctcctcccttcccccaccctccaccctctgaaaggccccagtatgtattgttaccctctatgtgtccctgtgttttcatcatttagctcccacttataagtgagaatatgaagtatgtgattttctgatcctgtgttagtttgctaaggataatggctactagctccatttatgtccttgcaaaggacgtgatcttgttcttttttatggccgcctagtattccatggtgtatatgtaccacattttcttcatccagtctatcattgatgggcatttaggttgattccgtgtctttgctattgtgactagttctacagtgaacatatgtatgcatgtgtctttataatagaatgatttatgtccttttgggtatatactcagtaatggggctgctgagttgaatggtatttctctctttagatctttgtggaattgccacactgtcttccacaatggtagaactaatttacactcccatcaaccatgtataggcactccacaaccttgtcagcatatgttatattttgactttttaataacagccattctgattggtgtgagatggtatcattgtggttttgatttgcatttctttagtgatcaatgatgttgagctattttttrtagacttgttggcygcatatatgtcttctgtcgaaaatgttcatgtcctttgcccgcttcttcatggagttttttttttttcttgtgaatttaagttatctataratgctggatattagacctttgtaggatgtgtagtttgcaaaatttttctcccattctgtaggttgtctggtttctctgttgatagtttcttttgctgtgcagaagttctttagtttaattagatcccatttgtcaattttggtttttgctacaattgcttttcctgtcttcatcatgaaatctttgcccatgtctgtcctgaatggtattgcctaggttgtcttccagggtttacgtgcctttgttcctttgtttcttttcttctctctcttcatccctccctcatttcttcctttcttttcttttcttttcttttcttcttccttycttcctcccttcccactcttcatttcctccattcttcatttttcccctccctccctccttcctttccttcccttccttccttccttcrttccttccttccttccttccttcccttttttttcttttctttcttgtcaaaacatacatttcaacccaggcactaaacagggtctgggtgtatagcagtgaacaaaacaaatatggtcttgtcctctcagcttataatttaggagatgaggcaaatatcaaccaaacaagtctacaataaatacgtattttcaaagtatgcacattctatgaaggaaataagagttggggggccttgctgggaagatgtcatttgaagggagccctgaaggttaagtagaatttgttcagtggaccagcaagtttagaaagttgcaacaaggtggagcacaaaccttggaagtccttgaagtgagaaagagcttggcatgttggaagatgatagagaaagccaaggaagggattgaaggacatgaaaagagaatgagaagctgggaagaagaggccttgtaggccatttgagaatattgaggtttaattctttattcagtagtgagtgattatagagtgttaaccagagtagtggcatgcatgatatacattgtttaccaatctgtttagccgttgtggggagaatcaactagaaaagggcaagcatggaattagagaaactgcttagatgtcgattacagaagtgcttttgagaaataacagtgactagacytggagagtcaggagtaaagagagcgataaatkgactgactctggaaatgttttggagacaatgtctacagaacatactgatgtattgaatgggggaaaaaaaagcaacgaaggatgaatcttaagtttggatttacaacacctccatgaatgatggtgccattgtctgaattggtaaactataggtgattcaggtttggggtggggagattcaaatagtcatgtgtcacttatcagtggggatatgttctgagaaatgtgctagactatttcattgtcatgtgaacacaccatagagtgcayttacacaaacctatgtgacattgcctactgtacacctaggctatgtggtatagcctattgctgctaagctacaaacctacacaatatatcgctgtcctgaatactgtaggcaactgtggcataatggcgagtatttgtgtatccaaayatatctaaacatagaaaaggkccagtaaaacatatggtattccagtataatcttataggattatggttgtatatacagtccaccactgackgaaacatctatatgcagcacataaatgtattctgttttagtcatgctaattttgatgcacttgtgaaactttcaaaagaaggcatcttgttggcaggagaagtctgaggggacatacacatttgtctcctgccaacatacaaatgatatttatagccactgagtgaatgaaattggctaaagagaaaatatagctttcaaacaaaagattaagaacaaagaaaagacaacgctttaggagatgggcagagatgccaaaagtttcacccacaatggcaactcacattaatataggactatgtgaacatagtgaggttttgtttgttttaacaaacacttgtaaaacacttactttgtgccaggcatgactccaagcactttgcaaatgttaacttgtttatttctcctaactttcacataaaggaattattatgattgttggccatattttatgagaggaggcatgtgctggtttagtaacttactcaaggccgcatagctagtaagtagcagaatcaggactcaaacccaggcagtccagctgcagaattcacattctgagtactctgccatggtactattctgagcatcctgtggtcacacctggattcagtgagactctcgcaatcataagtgaatatgtgagatggcaatgaaagtacttctgctcctgtttagccttctggatcttgattcttcctaacgcccaccacttaaagtcaatattgctcaaactcatagcttttaactacaaaataattcttatatatgtcattttattttatgccttctgctaccattgtggtttcaggctttcagaatattgtgataaacccctaccttgtttttattttcttcaatcattttttagtcattgcaacaagactaatcaaagcacaacagcatcctattatacccttgatcgaaaaccttcaatgacctcccatttcttgtagggtaatgtctacacatctctcctggtagccaaagccatctgcaatttggcctcaacttctaagctcatcagtcacaattccccagcatgtagctactgctgtcaacctggactaattaactcttccctgggtatgtcctcagcattctcagctcagcagctttgtcatgcctctcagcatattcagattattttcctactctaccccaccctgagggctcctatacctgcctgttgaaatctgactcattccacacaagccagctttagattaccccctttcatggctccttgatgtttcagctgraaatgatcaaattcaattctgaattcttaaactttctttgtactctttacgatagacatcacattataggaatttgtgtgtacagactgtcaagtcctagagggcaagtaatttgtatctttccacccgctatactgcctgcacggtgcctggctaacagtaggtgcttaaagtatttatgtacttgataaacagatgcaagaaatcgctctcagctgcttctttctatctgattagtacctgcagagcactgccccctttgtcttgctttccagtggaatgattctgcttcccagatgcatttgtatcttggagtgatttattacatcttttcctgaaatatatactaaaaccaagaatgttaagtgactgactccaaagttaagacttttgcagatagggtgaactctaaacragacattttttcccccagtttggctctcagcaaactgcctttcagatgcttcagcaaaataaaaccaaaaacaaatgtttttttttttttttwwtttttgkgggtgtgggagattggatggagccattggtgtatagatgagaagcaagtcttgaaaattcatttgttttcatctaaataagaccaaatgaaactttttcaggcttttattttactaatataatattgtttcaccataaaacatattttctaactggaattttttaagttggaaagagttattttgcaatacttatgaactagatattctgagttttctaatcagggaaataaattccatatattaggttttaattttgtagttttagtgataaaagcaagatattgaatcacatatacagtattattaaattttttatattctctcataactatagaagaaaaactctggaaggaaagctgcaaaaaatawgtatttatctctggatgatagttattgtctttttgtacatttctacattttctatttttaaaaataatttgcatgaattacttttgtgtgaaacttttcttaaaattgaactttcattttaaaagacttaggaaaaagggagatgttgagagtttatagtctaaaatttaagacttgtgaaaaccttatagtcttttaaatatctattctgttgagatattatttacttatagtaaaattctttaatttcaaatttacaattttgtgagttttcacaagtgtatacagtgctgtaaaagcaggatatgtaatatttttatgatcccaaaatgttcccttgtgcctcattgtagtagaggaactcctctgaccccttcacccttggaaaccaatacaattttacatttcccagaggttcatattaagagaaccatatgcatataatcttttgtagcatttctttcccttagcatggtgcttttaaagttcatccatgttatattgttgactgtattagcagttcattcctttatattgctgaatagtgatttattctatacatacatcacaatcacatattgatgaacagtttgagttgyttctagattttgtttatctgaaataaaacttatgaacattcatctgcaaagtccgtgtatgaacatatgttttcatttctcttgattaaatacctaggagaggaattgctgcatctatggaaatggctgtgtggtcttttatttttagtgtgttaaaatggtgaattaatgatttgtttttgaatgttggaccaaccttttatttctgggatgaactgcacttgactatgatatattattctttaatatattgttgtattccatttgctaatactttgttaaagatttttgaacttatgttaaagaggtatattggtctaaaagttttttttctatataatgtttttgtctggttttagtgtcaaggtgattctgtgtctggtttctgaaaggagctgtaaagtgttccatcatcttctattttctagaagattaaatgtttggtagaaaggcatcaatgaaaccatctaggcctacacaatttttataaagatttataactacttcartatcttgaattgttatatgactatccagattatttcttctacagtaagctttggtagaaagtattttcaaggaatttgtcrttttcatataagttgtaaaatttattagcataacattactcattatatccttttagtatactttcggtgtctgtagaatcttagtgataaattccttccttccctttgtactgttgataatttataccttttatatattattttcctattaaattcttttttttttttactagaagcttaccaattttgtcaatttctcaaaagaacagttcttggttggtgtcatggattttcttttttctttgttttccatttaattgatttctttattatgtctttttctttattttaggttcagttttctctgctctttctagttttttaagctgaaagctaaaaaccttgcatgcattattttttaatataagaatttagtgctggaaatttccctgtaggtactacattagcaacatcccacaaatcttagtatgtgtgatttaatttttattcagttcaaactattttcttatttctctgtaatttttgacccatgagttatttaaaatacactagttgagtgccaaatatcttaaaattttcctaggtatattcctattactcatatctagttcatttctgttgtgattgtcatacgtcttaactttttaagacttgttttatgtctcacagtatgatcaaattgcaaaacatgccacgtgcacttgaaatgaatgcatatagtgctgttatttggtggagttttaaaatacatgtcgtttaggttccattggttgaaagtgtttttcaagtcttccgtacattaactgattttttcatagttatgtcaattatttaatgaggtgtgttgaaatctccaattatccttgtggatttgcatatttcttctttcagttctagcaatttttctttatttattttgaagcactcttattagcatatggaaaccttacaacagtatagttccattgccctcctcttggctctgtggtattaatgtcatatattttattcctactcatgttatatactgtattacaattgttattttcactttaaatcataatttatcttttgaagaaattaaaaatgagaaaaatctttcatatttatccaaatatttaacttttatgtttattcccttgtgtagatccaaatttccatctataaagctatcattttctatacgattttagtacctccttaaatagttctttgaaatattgcagagctctcggcaatgaatgtttttatatatttttttcygaaatgggctttatttaacctttatttataaaatgtgtttttactagataataaaatctaagtaggttgatggttggttttctgtatttgatattgcatcagttagttttgttttgcgtagttttaagtaagtttactagcattcttacctttgtatctctgtatgtaatatattttttagtttgcccacttctaagattttttctttgttctggttttcatttattttgttatgatgcatcttattgtggttttatttatgttcaattttttatggttcattgagcttcttggatttataggtcttcataaaatttggaaagatttggccatgatttcttcacagttgttaccatcacccactttccaatctcaattccttctgggattctagttatacatatcttagattgcttgatagtgtttcacaagttgttgaggttctgttcaattttcttctttatttctctttgcactttaagtttaatagtttctgttgctgtttcttctagttcaagatcttttcttctgcagtatttaatctgctactaatctcatgaagtatattttttcatttcagatatttaaattttttatgtctagaagttccctttgtatattttggaaagcttccatttctctaaagaaattcccaggctgggtgctgtggctcacacctgtaattgcagcactttgggaggccgaggtgggtggagggcttgagctcaggagtccgagaccagcctgggcaacatgacaaaaccccatttctacaaaaaatgcaaaaattagtcaggtgtggtggcatgcacccatagtcccagctatttgagaagctgaggtgggaggattgcttgagcccaggaggttgaagctgcagtgagcaatgatcatgcaactgtaccccagcatgggcaacagagggagaccctgtcttaaataaaaataaaaaataaattcccagaaacatacaacctctcaagactaaccatgaagaaacagaaaatctgaacagaccaatagtgagaaaagagatgaaaccagtaatcaaaaacctcttatcaaagacaaacccaggagcagatggatcatgggtgaattctaccaaacatttaaagacgaattaataccagtccttgtcaaacactttgataaagttgaagaggacagaattctcccaaactaattttacaatggcagcatgaytttcatatcaaagccaaataagaacactaagagaacagaacattacaggccaacatccctgctgaacatagatgcaaaaatcctcarcaaaatactagcaaattgaattcaacagcacattaatagaatcatacaccctgatcaagtaggatttatcactggaaagtaaggatggtttaacatacagaagtcagtaaacatgatgtaccacataacagaatggattatgaaaaatatatgattatctcaatagatggggaaaaagcatttgacaaaatcaacatcctttcataataaaaattctcaacaaattaggtatagaagaaatgtacctcaacataataaaggccatgtatgacaagcccactgctaacattatacacaacagtgaaaagctgaaagctctttctctaagatcagaaataagagaggaatgcccactgtcacaacttttattcaatatagtactggaagttctagccagagcaattaggaaaaagaaataaaagattcaaattggaaaggaagaagctaaatggtctctctctgcagatgacataatcttatttatagaaatgctaraactccaccaagaaactgttagaactaataaatttagtaaagttgcagtatataaaatcaatgtgcaaaaaattttgtttctgtacattagcaacaaaatatgcaaaaaagagattaagaaaacaatcaaatttacactagcaccaaaaagaataaaatacttaggaataaatttaactaaggagataaaagatctatagtgcaaactgtgagatgctgatggaagaagacacaaataaatagaatgatattctgtgttaatgaattggaaggattaacgttgttaaaatgctcatgctacgaaaagttatctacagattcaacacaattccagtggattttttcacagaagcagaaagacaatcctagatttcacatacaaccacaaacagctctgaatatccaatgcaaaattgcattacaataacaaaactggaagcatcacacttcctgatttcaagctatattacaaagctctggtaatcaaaggagtatagtactagaataaaaacagacaaacagaccaatagaacagactaagagaccagaaataaacctatgcacatcactcaacgcatctttgataagggtgtcaagaatacacaacagggaaaggatagtttcttaaataaatgatgttgggaaaaataggtattcacatgcaaaataatggaattagaccgttgttttacatcatacacataaaaaaagttgaaatgaattcagatttaaatgtgacatttgaaactaatactcctagaagtaaacatagggggaaagctccttgatattggtcttgccaaagatttttttaatatgacatcaaaagcacaggcaacacaaacaaaaataaacaagttggactacataaaactaaaatcttctgaacaacaaagaaaaaaatcaagatgaaaaggcaaactatagaatgggagaaaatatttgcaaattatacatctgataaatggttaatatctaaaatatataagaaacttatacaattcaatagcaaccaacccaaacaaaaaaacccctaatttaaaattgtgcaaatgatctagataaatgttttttttaaaaaaggcatacaattgaccagcaggtacatgaaaaggcatttaacatcattaatcataagagaaatgcaaattaaaaccacaaggcatcacttcatacctgttaggatggctattatgaaaaagacaagagataacaaacgttggtgaggatgagaagaaaagtgaacccttatacaccgttgatggaaatgtaaattggtacagccagtatggaaacagtatggatattcctcaaaaaactttaaaattgaactactgtatgatcctgctgtctcacttctgggtatatacccaaaggaaatgacatcagtatctctaagatgccagcagtgtcatgttcattggagcactatccattatagccaagagatggaaacaatctaagtgtccattgatggatgaatggataaagaacatgtgattttctcacagacacacacagaggaatattatttagttgtaaaaaagaagaaaatcctgtcacttgccacgacatgaatgaacctggaggacattatatamgatgaaacaagccagacatagaaagacaagtactatatgatctcacttatatgtgaaataaaaaattagaactcatagaagcagagggtaaaatggtgattgtcagagcctggagaagggaaaagagcagagcacagtgaaaatgggagatgttcgtcaaagagtacagactttcattacaagatgaataagtactgagtatctaatgtacagcatggtgactatacttaatatcatattgtatactttaattcacgaaaggagtagatcttgtgttatcaccacacattcacacaaaatgtaattatgtgagataatagatgtgtttatcaatttggtggtaatcatttcacaatgtacacctgtatcaaatcatcatgttgtgtgccttaaatatatacaatttttatttgtcaattataccttaataaagctggggagtaaaaagcttccatttatcttctaatcatgctcatgcttttgtctacttcctgaacatatggaaaatcatgataatagcaatctcaatgtttstgtctkctaattgtatcatttgtgttgtttctgcttttgttgccattgattggtttttctcctgggcacaggttatcttttcttgcttctttgtatgtcttgccattttgaattgatggtagataytgtgaattttactttttgggttgctggattttgtcatattccttttctagtgttggattttcttctagtatgcagttaagctacttggaatctcttgtaggcttggaagctttgcttcattagggtagttccagaaatcattctaaggctaatttagctcctctaccaagaccatgccctttcatgggttctacctgatgttgtgtgtattatttacctgtgtattgcccctttacctgttgggaatacaaactcttcccagccctttgtgaccttcagaaattgttgtgattacctcttttcagttttctcccctggctttgggtattcttctctccagcatgctaacattcaccctcagccaaagactcaaaagacccatctgcacatttctggcagtccatcttggaatagttccttcctcttcagtaacttgcaccatgatttctagctgccttggtctctccgaactctgaactctgtcccctccactcagtgaggctactggattcggtttgggttctccctctctgtgctttgatctggaaacatttttttcagatgatgctctgggccatttataagggtcatcttgtttgtttctcttctttcagggatcattgtcctgcatagcctgctgtccaatgtctgaaaaccactttttatgtatctatactaattatctaattgtttaaggcatgagggtaatctcatccctgtcattccatggtggtctgaaatgaaagtttctttaatgattctctatttgaagacctacattcaacatctctagaatgcagagaaggctttcaaggaaaaacagagagcaaattgctatcatagaaaaggatatgagggtcctaatacctgtaataaaaatgataccactagtggaaaacaaacatgagcactcataaatagagcagatatttatggaacctgatatcagggttccatgtttacagatgaagatgagagcccatgtctttcctccaggggagatggtggtttttctgttattgattttgaaagtgacttgagaatgactccaaaaaaaaaaaaaagaaaaaaaagaaaggaaaaaggggatcttaattttataaagaatatttgttacttcccagctatatcatctccaactgatagccatttgcccactccttcacacattgtgtgtctagtcagtgtcaccttctgagaagacctgttctaactcaggattgcttgatcctttggaatcttctctgtaccatttaatcaaatatctcttcctcctgtttatctgctatgtcctcctgaataacatagaatgtactgtattatatattaataattgacgaccattatgaggtctctcttaaatcgtcttttatctgaattacaatcctctgttgtcttatagagaacatgactttcagaccctcttaatgtactacccattattctttggacaaactctaatgtgttacttttacacttagcatatgattaaaagaaatgaatattctaacttaaatataggrtgaatgagtcaattacttcccatgacaaagaaattgatttctattaatgcagcttaaggtggtattagcttttttcaaatgtgtagagatttaatttctaggtctatctggaactaaaggtaatttaaaacccatttattttctacccaaatgatatatgggtagcagagatgatcacagggagcccattggttcagccatctgtctgggctttggatagagattcctgctggtttcagatcactttaaaaaaaatcaatgtaactttcattccctgaattaaagccagggcctgctgtttaagatgatcacttctcccctgaaattttctatcagcttctagctgacaaaaggtgctgtgtggaatggaagtatttttttaatccctgtcaacagtgagaataggaacttaatctaatatttagaggaaaaagttactcatcctggatttcagtgctacaataataatactcagagagaaatttgtctaatacgtatttgctttcttggaatcatatcaagaacaagaaaataaagatattctcagattcctaagaaccaaattgtcaagatgggggagaattaatctacacttcccttatcacaggaatttcagaagagtaaataattataaaatgcatgagttgggaaaaattttagaaatcatttaattccgttctctcactttacaggtaaagaaagtgaggccaagagaaataacaggccttctgacccctagtcaaaatttctatgacactatttgaaatacttcttgaaatataccatgttattaaaataattcgaaacaggacccagagaaacaccaagtcttaattgcaatcatgttttgatgattaaggcaaaaaggaaaggataagcaaaaaattggcaagagaaatgtttaaagagtgtagagcagggaggaagtcaggagtcctataacttattgtctcttagatacagagagttgttccagttttgcaaaatgcctgcaaaatacattgtcttacttgcttctcatcacaattgtatgaggcaagtagatgagacagatctgatttctctcctttataaatccattttttatacacgtatctgttattgcctcagcagtacagatgccatttactagatcagttaatggatgccaagtctctatttacatcttgctttagtgtttaattcagtttagtcttctgtattctaattccaaaaagcaacatggtatcagaatcctgaagtattgtaagaatcatattcaattttgtactgacataagctgctctatttgggcaaaaattggtagcctctccaagcttctgtgcactcattcttgaaatgggaacgataacagtattttaaagtttatgtgacgataaaattacttttgacaagtgtgcctagtagatacctggttactttcctcttcttcgtaagccgtcccctctcccacatcctctctgtaaacttcagttctctgtatcccactcagttgttcagtttatgtgcataacttcttaattaattttcttttgcttgtcctgaattatttagaaatgcattttaagcatgatacctgtttcctccatcctttcaatactgtttattgactgccttctgtataccaggmacttggatacaaygaaacaattggatagaatacacaccaacagagagggagtagtttttcaccttgaggaattgaggaggtaaataaaaggagtgtaggttgtgaaaaaaaaaatgctataaagagttttgggccagaggatagtagtaggtgggcaagataatgagggtctggtatggaacaagaatcaagctttaaggtatgagagaattatttccttattttaggaaaagttaagggaattcttcactgagggagcaggatgaccaaaggcacagaggctagaaaagtcacggtgtgtattgggaaaatacagactctgcatagttaagacaatcttcataaaaatgtcagaggagttgaggctggtctagtgtcatctggggatcacagagggcttggaatgtccttggggagagggtgagagtaaagctttcaaatctttattcttgaggtttttaggaggagggtattttgttcattatggggagaaaaattgctctttgacttaatttctgcttatccccttttaccttatatgcaaatatatatttctttatgaaatgtacacaatgcattccacctagtataaagcagaggtctaagttgcctctcctggttctaaatccaggtgttactcactgatctttatcttgcttgatctctggagtattctatattgttgactgcaactcctccttaaaattattctctcttagctacttggatgctgtctcatgattcttcttttctacttcttttctacttctcaatgctgactttttaagcattggtgtgaactctcttctccctacataatattgcagggtgatatttcacttccatctattcaactgccaacccagggatttcgaatttgggtagccaagatctttcttttgagttccagacatttccatttcgatatcccactgatttccaaaattgacctcatcatcttttcttcaaaatcttttcccaattcttggttaccacatcacttgtcttaatcattctctcctccttcaattataatggagaccttagaatgccactcttctgccactctctgctcactgccctccctgagtcaggcagggactagagtccttcattttctggccttgcccgcctcagtagctccacctgcacctcatactttagttcattaatgactgtgaatgtatcatgctctgatacatcactggctataataataacacaaataacaattgcccatatttattaaggactaattgtgtttcaggcactaggccaaaacactatacattcattatcttatgtaattcacacatcaaccctaggtggtcagttcttttattatccctatgtttggaagaagacactgaggttttcaggttaaataactgacccaggctagtaagtggcagagccagaattcctactgtgaagcatgatgccatgttgcttctcttatgccttacacaatctgttccctttacctggaatttcctcccctcacctgcctatttttcctgttggatgactatttattcttcaagatactccaggtggcccctccttcaagaaaccaggtaattctctggggtcccaatgtttcctatgctcccaggagtcttacatactgtatcatctattatctcatttcttctactatactgcaagcctctggaaggcaaggaccatgtcacatttatctttatatacccagagcctagcacagcacccaggatacagttgtaactttatatgttattttaaaataaacaagatttcgaatgaagcctaaattcttttwcttgctgtctgatctcacttaacaaaattggatcaattctattcattgatccagtttggcctcattctattcaagtataaaatgagaaagttacattacaacggtggacacccccacatgtggcccctggcccagcagcatcaacatcctctgggaactcgtgggaaatgcaaattctcaggccccacccctaccgaatcagaaaatctgggggtggggcccaccaatctgtgtttaactagctctccaggtgattctgatgcatagaatatttgagaacccctagacaaggtgttggccaactacagcctgagagtccatgagccaaatcctacccaaggcctgtttttctatggaaaagttttgtcaacttctgtactaaatgctagtgaagcaggatacttccctgaccccttcatgggactcacaacaggaatgcctcatttacatagcccaccgccctcaactcctcatgggagagagtgcatgagcgaacgaggcaggaactggagtgcatgagtgttggaactgactagacacatcggcaccagcaggagtgaactccatgtgggccccacggcagcatccaggtaggggtgcctgtgacccctgaagccccagatgatgtgttacagtgctcttttagcactgccatctgtggatggcttaaatgttaacagctcagtgagtcttttgtttttttgtgtgaggcagctgccctctgccagcaagggcaaagggccagtgtgacagctttttgtatctacactcatggctcttgggctcttgtacagcatccaggaaaagtgaggtcacacaaattgaagaatggtaaatgcaggagattttattgccaatgaaagtgggtctcactgggaaggggagctgaaaaggggagacggatgagagggtaggtaatcttcccttgaagtctagccatctctggccagattattctctgaagttactccatcaagccatccctctgaagtcaagctgctgctctctgacatccagctgctcctcctctctgctggctgactctggggwctttataggcacaggatgaggcatggtggggccatgggtggtttatgaaaaggaaacattcaagtggaaaaacagcgatagaatttctcactttgggctgttgtttcaggcttttcagcttgaaggtggggcttcaccagagactcacccttttctggctagaatttctctgcctcctgtccctatcagtaggatcaccaaggagccttccagttatacagttcttttgttgtgagcccagtgtgatatctctgattgcttctaccttgtaatcaaagttaattctactcccctaaccttagtttccttgtcatgaaaaatgagattgaagtaaggttatcatcacccatcccagctctcctgtcctctacctacttgagctgtgcaatacattgtttatttttatttcaccatcacttatttattcctgtagtctctaagagctttcaaacactaactcatttagtcattgtagcactgttattagccatatcttataggaaaggagttgacacttggagaggtaaaatcattctcccaaggtgtcacgcactggtgaagtggttgagctggactggattggactcagacagcttggcttcagatccctactaatctccccataaaatagaggggactcctatgtaaccatcccccagctctatcagatctaaaaacctgccaatttgtgtcacatttccctcttctcttttaagaaataaagatacaatcacagttaaaggcaactatgtacatcttaattgattctcttctttacttttctacctagatcaaaccactgtccaagactctatatttgcattctcacacaagctttaaaaaactttgagatataattgacataggctgtacatatttaatatatacaacttcatgagtttagagataaatacacactcatgaaaccatcaccacaatctatgccataaacctatcacctccagaagtttctttctgctctctttattatttctactattttgtgtgtgataagaaaattttacataagatctaccatcttagcaaatatttaagtatacaatacaatactgttaactataggcactatcctgtactgtagatttctaggacttgtatattccaagtgcggataaagtgctttgtacccttgactaatacctcctcacttaccccttcctgaatttttgtcaaccaccatttcactctgcttctatgagtttgactagtttagatttcacatataagtgatatcacgcaatatttgtatttttgtatctggcttgtttcacttagcataatgtcttctaggatcattcatgttgtggcaaatggcaggattttcttctttttaaaagctgaataatctcttaggagtgcaaaccctattgtatataattgatcaaaagagatattttcacttgcatgttcattgcagcattatgtacagtagccatgcaagccttttaatgtatacattaaacagtttgtagtactatttccatgctgttaatctttattgttatggtatcttatagaacatatctttctgtagcttgttttctttttccacttaatatgtttgttgagacttayttattttgatagatccattgggttttagttcatttaactgctgaatagtaccctattaaatggatttactacaatttatttttccattctgcacttcatgaaaacttatttctaatttttcgctatgataaacaatatgcaatgaatgttcttttgtattcttggatacacatgtgggtttatatcaggaatttgacttccggattatagggcatatgcatcttcaattttattagacacttcggtgatattctccaaattagttctacctatacatggagtattaacctatgcctttatgagtacttggcattgtcagtcttttgtattttttcaatatgaaggggaaaaatgaaatcttctaattgttttctctgggttcaaattggtatgagccacagtatccaattttactactctatatctttgtccttgctctttcattttgtatgaaacattcttctgattctccacttaacaacatctatttttccttcatgacccaacgcaaaaatttctctgaaacctctggtggcccaccttcctccaaatccatgttgtagttggagtcattgccaaccacttagtaagccaaaaatcttagttctcttgactcatgccttgacgtatacttcaattagggttctcctttgtgtttcaagacatttagatcctaattaggataatgtttatgtcagttgtccttgcagaatttttgatgctcccctttcattctcaaatgtcacactgtttggataatgaatcaatgctgacccttataggctttattggagtatattgacatcycatgttggcccatttttctccctggcaaatctgagatctcttagaccagtgatattttcaacgtgcctgacttccaatatttgctcaataaatgtttgcttctagccagccactcctttgtcatgcagaaggaaggtttccagtcatattttattctcttttcatggggcccgacttggcccaaacccaacttctccttgccagagagaagtgtaaagaatgctttctctgcagaggcatagcccattttcttatgagcaaccggccaagaggaaggtaccatgaagacagtaactaaaggaaaagaaagaggctgctttctaattttacttcaagctttatttaagagtgaagtttcatgagataattagattaagtcagagtgtttccagcatgcaaaaagaggtacaaagccttatggattacagttattcagaaagctatcaagcagaccaatgcataaaaggaattgctcttcaaggaagattccttgcagaatgaaaataataataataataataaagtgatattgatatcctttggttgccttggaaatactagttcatctgctcctgtaaggtattatggttcatcccactatattaggtttaatagaaaatcacataaccagctatatttttaaccatgtctgggatttaaagcattcactgggctgtagtgatagtgggtaagcatagaattgtgcattttagtttgtgcattgatatgacctccttgggttgagagggcagaaaagccggtgcttttaacttactcgatttttatttgtgtgtattagagatctttactgtgctcatggcagctcttgtattttttcagagtgctttcaatttcaaattttggtccctctgttaaaattctgtattgccctaaatatgtggtcacggtaactagatctcaaaactttcagggaagccagacattctcaatttctaatttttatcaactgtatctttttttcatcatttgatttatcgattgagcaacttattgcaaagggaaatttggsggaatgggagaagatattagcattaattaaacacatggcatcaccaaagaactgtgtgaagaactctttacttattattgtctttaatccttgagatgttagaaacccttgatatttttaaaaaatattttgggaaactctactagaaaatgatagagctttatatgaatcctttacatgaacagtcacagaatcccatgttattcctattatacagtggtgaattggtgaacactacctataatttaaaagtgtcaaaattcacaagattgggtgcagttaagtaaatgtgtttgtgctttacccgttggagagttggagtcacagccaggcacagtggctcacacctgtaatcccagcactttgggaggccgaggtgggtggatcacttgaggtcaggagtttaagaccagcctggctaacaatgcaaaaccccatctctactaaaaatacaaaaattcgccaggcatggtggtgcatgcctgtagtctcagctacttgggaggctgaggcatgagaattgcttgaacccaggaggcggaggtagcagtgagctgagatcatgccactgcactccagcctgcacgagagtgagactccatctcaaaaaaaaaaaaaaagagttgaagtcattgccaaccacttaataagccaaatatcttatttttcttgacttatgccttgatgtatacctctattagggttctccagagaggcagaatcaataaaatatgtatggataaatgagaagagatttattaaaagcattggctcatgtaattatcaaggctgagaagtcccatgatatcctcaagctggataccctgggatgccagtagtgtggctcagtccaagactgaaggccttagatctaaggaagcttatgacaatccccattccatgaccaaagacctgagagcctcaggtggggaaaggggttgctgctataaattctggagcccaaaggctgggagcctgaagtttttgtccaagaacaagagaggaagagtgtatcccagtttcagcagatagattgacacatttgccttttctggacttggaagaatgaatggtgcctcctcatatcaaaggcagatcttccccacctattttactcagacccacatgctaatctccttggaaaaacccctcacagacacctaaaaataatgctttaccaagtttctaggtattgcttattccagtgaagttgaaacctaaaattaaccatcacagtacccaaggactgcatatttagagcagagatggaaatggaatcccatttgtgcctcctgtgcttccatttatgtgggattcttcaattcccacaggactaaagcaagtttcctttgtcagcctgaacatccctgtcccacctcctcctctccatgggtgctgcttctggttacacactctttctccctttcatccattgatgttatcccactgttttgcaactcatcgttaagagagaaaggtcaacaggccctacggcatgatctttaaaaggctgataaggtcaagataaatgcatcctcttaaatctgtttttaaaggccagaaccattcatgcatttctaggagaggataatgacatcaaaattattaccaggagccagtccctgtgatcatcaggggcagccaggatttactgctcagctggacagaagcctttgctactacacgcctatgtttcatccctggtggactcaattttagggtatgaagagcaaagtcattctctctgcactctgcagcaaagcagtatgtgctctacagaaatgaacagatgccctcacttgacgtaaaaagtcttataaaagtctttctctcttaaagtataaatacacagtgtgtgagatgtatacatatgtattataatacaataaattatagagtagatccactttttagttacatagcttttttcatacttggatttgaaatgaaacatatggctaaggagttataagtttcttagaatatttgtggtcaaggttcaatggctcacatgcttcttaatttcttttcttttcttgagagagtcaagctcaaggtgactgtgaaagtcactgaatgactgaatcaggtaccactattggccaaacatcctgacaggcactttatgtctcgctratcttccacaacagtgatggggatggcaatctttggcgttttacagatgagaaacagcaaacgccttcgccttgagaggttgagcaaccttcctaagcctgttgtggggtggtggggttgggggtgagggcgggtgtggtttaactccaagacctgcgctctattaatacacccctgcttcaatctgaacaggattattcaaggttcagaaacatggtgctctatctaaatcagtgtgtttgctctagaatcaggaagagcactcaaaagttgtgggaatatgattgggcttgttgacaaaagcgtgttttgataccatctcttgaaaacttaaatttgagatgataatttttcatctcctatgatgatctacctaaatcaggcaagagggggtccaggagatctaggtgggttccttcttgggttatagagaagatgtgagagaaggcaagatctaagaggaacttcagcaatgaataaacataaatgggctcaattaagttgtagaattaacttatcatttaaaactgaagatgttcactgtttactagtgaaaaacagaccttgacatatttgggctatgatagcaccctcaaaggaattatccagtagttttagataagattactgaacaggttgagggacaggaataatgttggaaagggaatgtaatgccagaaaaatacattctccaggccacaagttgggaagagttttagcgtaagctatgtgggaaaaggtaaaaattgaaatgtaaaagttagtgttagcttcttcatggccctaaaagtcctatcgtcacagcagaagctttgtgggcactctaagagtcaacaattttgtgggtttgcattagagaagtggacagtatgtctaaatcaagatgatggccccactgcttttgaccagcactggccctttgcaatacactggctcatagctgagtatggctcccttcttattttgtccacacccaggtattatttttagttgcttttccagagcaacggcctccaatatttgcaagtgatgcaactggctggtagaatcttcttttgggagggctccacagccaaaatctcaaatggttgtctagaaacttcagtcgtacctcacttcatgccagatcagtacctttaaaaggttttcagtaaatcattattttacaattccaatttcactgaaatgccacaaagcatgaagtgttttgaagttttttaataaggaaaactagaatagttttgtgaaagatagctatatgtatagatccttgattggtatactttttctattaattggatttgcatagaataggtttgtttaaaaatgagaacacacttgtagtcagtttcactattgggaatactgatttcatatctatgtctccttgctaaaaaattgagaggtgtaagaatttggccaaatgtaactctgcagcctctgcattttgttaataacatcacagtacctcatggggtttttaacaccatcattaagaggagctcatttggttctcacctttattatctcatttatcttactatccctgggaggcatggactcagatattgctgcttgtatttacagagaggaaactgagaggtcagccaatataaagtgatggtcagcaagatggctttagagagaactcacctcagccaaaagcagtccagcctaccagtgttgaaagtaggatcccagaagctcttgacacaagggttcaagggaagggagattctgtcaaatgactgtctctgtctcctacttgtttctctctaccacttattagatacactgtgtcactgtggacaaattactcaactgtgactcacagctttctcatctgaaaaatgcaaagcattgtatctgcctcacttctggaaagagtttctttcctaagaaaaattagctctgattctgagtaggggtgaggggaaaaaagtgaatgagggtctgcaaaagggaatgaggtctcctgaacatggcttctgtaaggagagttgcatagtcactgcttcagcctcagggcttccttctttcctacactatatagatttttaaaatgtaatttctatgtgcatgtcgtctttccccaattttagatcctagactcccagagtaaccagctggggcagacttcagataattatagttcaaactcctcttattatagatgagaaaactgagaactgatgaggggattccaagaagaaagccagtctgttgcatttcctttcctctaggagaggggtctccaacacccccaccctctacccccataccagtcagaggcctgttaggaactgggccgcacagcaggaagtgagcagcaacaggtgagtgagggaagcttcatctgcatttacagccactccccatgactcacattaccacctgagctctggctcttcttgatcagtagctgcattagattctcacaggaggtcaaaccctattgtgaactgcacatgtgagggatctaggttgcatgctccttatgataatctaatgcytgatgacctgtcactatctcccatcgcccctagatgggaccatctagttccaggaaaacaaactcaggactcccattgattctacattatggtgaggttgtataattatttaaatattacaatgtaataatagaaatcaagcacacaataaatgtgatgcacttgaatcatcctgaaacctttgccccaacccccaccccaggtccacagaaatattgtcttccacaaaactggttcctcgtgccagaaatgttgatgatatggtttggctgtgtccccrcccaaatctcctattgaattgtagttcccataatccccatwtgttgtgggaaggagcccatgagaggtaattgaatcataggggtcgttacccccatgctgctgttctcataatagtgagctctcttgaaatctcagggttttataaagggcttttccccctcttgtttggcacttctccttgttgctaccacatgaagaaggatctgtttgcttccccttctgccatgattgttagttttctgaggcctccccagccatgctaaactatgactcaatgaaacctctttcctttataaattacccagtcctgggtatgtctttgttagcagcatgagaacagaccaatacagttgggaaccgctgctctaggacgttttctcccatcatctgcctctgtctttgaaaactctaggtctctgggaggattaaactagaaaaaaagggacatagtagatgctattgagtagagaaccatgggagttgtatgagagaggaaagtgagattcctcaagtctggaaagacagtggtggttcagaggagactttgaggcttacgtaattttactctagtgcacatttattgcacaactcactttgatgaagaatcctcagccgcatggggcccctaacccatgtcactctgttccacctcagtggaagaccctttggctttcttagacaatttcctctgtcttcactgggacaagtttacttatgaatgggagcccatatttgctagaatcttaacctcagccagattaggggaaaactgttattcttctctcaatttaaaagatattttccttctgtgtgtacatgtatgtgtacacacagatatatatatttatatgtaatatacacattatacatatatactatgtgtatatatatatttctatgtttgtatatttctttgtacataaaaaagcatagaaatacatcctggacaagtttatttcctcagcctttcccatatgggttccatctcttccctgtcaccatcaattctgtctttatctacagcttgaaaagtaatcatcaaatccatttgtatcaacaaagttgcctrtcacttgctgaaaaggctggtattttatgcatgttttacttctctacaatcaaaaatatcttaagttaaatgaagacagaaaaggcattcatgaatagaaatggcagtgtcctgattttatcattttctatctaggtgctttacccatttggtttaagtggcacttagatttttttttaattattcccttctaaaaatgcagtgaacttgaagcaaaaaatccatctagtcctatgtgaatgaaccttgggaaaattgctttctattatcaatattttccagcaagagccacaatgaggaatgtgtctcttctgaagtatgtgctgtttctccttggagtccttgcttattaatcatcctgaaactctgagctataaaaactagtgtgaagtccttcttcaagctctatgacaataagttagctttattctctccttgacattacttgtatgagggaaagtggagtagaacccaggtggaggcatgtcctatgtcacagagaccctgtttagggcactggtgccctgatatagaactcagccagttcaatcagatagaggctcagaagcatgaccactttacagtagaaaacatatttaaaagcagtaaatatcagacttccctttttaccttgaccttaatatacagtatgtatgtatatttaagacatttttttccatggaccaggggttgggagggaaggttttgggatggttcaagcatacatacttactgtatattaaggtcaaggtaaaaggggaagtctarcattctgtcatgtcatagctgactttttgggggagtgtatatatacatatmctatatatatgatatcctctttcttcatggtaatgataatcatttttactttatgaccatcatcacaatcatcaatatcttaaacacaataattattatcactatcaccattatcatagctgacttattaagcaattaccctgaataagacactattctaagcactttgcatatttattatttacagtcattaccagcctgtaatataattattcatgattatcattttaagaaatctgaagcttagacacaaaaagttatctgcttttagagggaggcctgggtatcatctgtggatgaggaagtagcctgtgagggccccaaagtgcttctggatatcttccaatacacaatatgccacgctgctacttccttcacctggctcccttcctctgcttccctttggcttgggatttctggcagtagctttaccccctcccaccccccactgactccagcttgtgatttggcagcccctcaagcatgcacgggtttatagtgaggtcacattgccctagtactctcacttagggcaactggtgactaggactgcagatcttaatgttacttaataggctcaacattattatctttttacataacttaaatttggctcacatttcacatatgtgactatgtctaagtaaaaataagtrtattatgtgttcagtctatggctaggattatgacagtataagaagtatcacctcaaacggggatgttctccttctggctatggaggattagcttagatcagattgatccttttgcagagaaccagataatgtgcataaaatgatttaaaaatatcccagaagggattttagagtaactgaggttatgaagccctaagcagccaagagcccagatagaagggaagtgcagaataaggtaggagtcatgttcgctgagataatggttgagaattttctaaaactgataaacactaacccacagaaacaataaacttgacaaaccccaacaagaataaaataaaataaaactacacataggtaaaacatagtaaaactgttaaaagataaaagtaaaaattttaaatatagacagaagaaaaaagagacatttaacctttaaagaaaaagacataaaatgcagacttcattcaacacaaattatgtctgttgcccactttttaatggggtcattttttttgcttgttggattgtttaagttctgtctacattctggatagtaggcctttgttgcatgcatactttgcaagttttttttttttgccattctgtaagctgtctgtttactttgttgacagtttcttttgctgtgcagaaactcattagttgaatcacatcccatttgtaaatgttggaggtttttttgttgcaattgttcttgaggacttagtcaaaattctttgctaaggccatgtccattagggtatttcttaggttttcttctaggatttttatagttttaggtcttacatttaaatctttaatccatcttgagtttatttttgtttacagtgaaagatagaggtttagtttcattctgcatatgcacagccagttatcccagcaccatttattgaatagaaagtcctttcctcattgcttatttttgttgactttgtcaaagatcagttggttggttgattggttgtagggatatgggtttatttctgggctctctattttgttccattggtgtatgagcctgtttttatactggtaccattgctgttttggttactgtagccttgttatatagtttgaagttgggtaatgtgatgaagtctgacttttatttttgcttaggatcgtttagccatttgggctcttttcaagttccatatgaattttaggattgatatttccaattctgtgaaaaaagacattggcagtttgcaaggaataacatcaaatctgtagattgctttgggcagtatattcattttaatgatattgattcttccaatatgtgagcatggaatgtttctccatttgtttgtgtcatctttgatttctttcagcagtgtttggtagttctccttgcagaaaattttcacccccttggctagatgtattcctaggtatttttttgttgttgttgctattgtaaataggattttgttcttaatttggctctcaggttgaatattatcagtgtatagaaatagtactgatttttgtacttttattttgtatcttgaaactttattgaagttgtttatcagttttaggagcctttaaatggagtctttagggttgtctagatataaaatcatgtcatcagcaaagaaagataatttgactttttttcctatttggatgcattttatttctttctcttgcctgatttgtctggctaggagttctagtactcagtagaataggagtggttagaatggcatccttgtcttgttctagttattaaggggaataggggaattgttctagctttcacccactcattatggtgttggctgtgggtttgtcacagatggtgccaataattttgagatacattccttcaatgcctactttgttgagggtttttatcatgaagggatgttggattttactgaaatctttctgtgtctatcaagatgatcatatgatttatgtttttaattctgttcatgtcgtgaatcacatttactgatttatggatgttgaaccaaccttgcatcccaggaataacacctgcttgattgtggtgaattaacactttgatgtgatgctggatttcagcttgctagtatttgttgaggattttcatatctgtgttcttcagggatagtagtttgtagttttctttttttatcatgtctttgctgggctttaatgttgagctgatgctgatttcatcraatgaattagggaggagtctctcctccttgattttcacttgatcttagccaaagggctgagaagcagtcctcctccttkattttctagaatagtttcagtaaggattggtaccagctcttcttcatatgtctggtagaatttggctgtgaatccacctggtcctgggccttttttggttggtagtcttttaaaatgactgattcaattctggcacatgttattgttctgttcagggtttctatttcttcctgattgaatatttgaaggttgtgcattcctgggaatttatccattttctctagattttctgtttgtgtgcatagaggtgttcataataatctctgagtaacttttgtgtttctgtgggattggttgtaatgtcatctttgttgtttctgatagtgcttatttgaatcttctcccttttttcctttgytaatctagctagtagtctattgatcttttttatccttacaaaaaataaactttggttttcctgtatagatctttattttgttcagttctgaaaagaagacatacaacattactaattatcagagaaatgcaaatcaaagttacaatgagatatcatctcaagtcagaatggctattaaaaaaagaaaaataacagatattggcaaggctgcagagataagagaatgcttatacactgttggtgggaatataaattagttcaactactgtggaaagcagtttgaagatttctcaaaggactaaagatggaactactattcaaccaagcaatcccattgctgggtatatctccaaaggaaaataaatcatttttcccaaaaagaaacctatactcagatgttcattggagtggtattcamaatggcaaagacatggaatcaacctcaatgcccatgattggtgtagaatttcaaaatttctgtgattcgctttaattcttaaaaaatgccattccatttattctgccttccataacttttattcaacttttattttagattcagggggtacatgagtaggtttgttatayggaatcaacctcgatacccatcaatggtagactggataaataaaatgtggtacatacaaaccatgtaaaactctacascaataaaaaaagaacaaaatcctgtcttttgcagcaacaatgagtgatgctggaggccattatactaagcaaactaacacaaaagcagaaacccaaatactacatgtacacatacatggtagctaaacattaggtacacatgggcataaagatggcaacaatagaactagggacactggagggggtaaagaaggatggggcaagggttgaaaaactatttattgggtactatgtttactacctgggtgatggaatcaatcatgccccaaacatcagcatcatgcaatatatccatgtaacaaacctacttatgtaccccctgaatctaaaatagaagttgaataaaagttatggaaggcagaataaatggagtgacattttttaagaattaaagcaaattacagcaattttgaaattctataccaagtaaaattatcctttcagtgtaaagacaaaataaagacatttttagacaaaaaatgacggatttgcagaaaacaaaatacaagtgaattctttaggcaaagaaaaatgatcctagattgaagcaagaaaattcagaaagtaatgaggaaaaagtagacatataaattaatattgaccctataaagtgatattaaaatatgatgctactaatattgttttgagtttaaaatttatgcagaattaaaataccacccccccaaaacaatgatataaaatatggagagggtatcattggatttgaagcttctaagaagcttgcattgttcaggaaatrccaaaaatatctgaaaatatatcatccaaattgtttaatatgaggtaatgtagatttaaggcaaaaaatattaccagcggtaaacaggatattttataatgataaaagggtcaatccactaaaaagatataacagttctaaatttgtattcaccttaaatcatagacttaatttcagtaaagcaaaaattgacaaaactaagtgaagaatagagcaatctataattatagtaggagactgtaacaattctcaacaactgatataacaaactttttttaatccagaaaacacaaagcagattgtatatatacatatacatatatatatgtatatatatctcttcacagtgatattacactgtaagtaaataacaggaatgtaactaggaaattcccaaatgtattcccaaatgttggaaaattaggcaacgtatttctaaataacccatggatcaaagaagcaattacattggaaattacaaaatatttcttgcatatgcctactttgatctggggcttctgggatgctggtaatgttctattttttagtgtaggacctagatttttggtggcaaacacatagatgtatttactttgtagaaatgaatcagattatatacttatcatctgtgtacttttctgcatgtgttgtatacatcaatttaaacatagtaaaaaaaattataaagtgtatgcttggattgtttcatgtaagaaaatctccaaataccttctatctgctgaaaactgcttgtgggattgacaaattaaaaccaaaccaaaataacccttctctcccagtattcggagagggtgaatcagtcaaagataacatttttggtggaagagacaatacagagaaacattaacatgtttacaatgtacaaattaatgtaaatggctacactatgtttcattaaaatatataatttcacaactaacgttttgttcattaaagagaataatggcaatgagactctttaccctaattttaaaccactaaaatgtctgaatcttggtgtttgtaaaaagaacctagaattatgtgtgtctgttttgtgctgctataaaggaacacctggaattttgtaatttataaagaaaagaggtttatttgtctcatagctctgctgggtgtacaggaagcatggcattagaatctccttgtggtgatggcccccagaagcttccaatcatggtggaaggaaagtgggagcaagcatgtcacatggtgagagagcaagcaagagatagaggaaggagtgtcagtctcttttaaacaaccagatatcatgtgaactcatagagtgagaactcactcattatcatggggacagcaccaagccattcatgagggatctacccccgtgacccaaacacctcccactaggtccacctgtaatactggaagtcacatttgaacatgagatttggaaatggcaaaatatccataccatattacttcttccctggtcctccaaatttcatgttcatctcacattccaaaatacaatcatcctttcccaatagtcctccaaaatcttaactcattccagcatcactcaaaagtctaaagtctcatctgacactcaaggcaagcttcttctacctacgagattgtcaaatcaaaaataagttatttatttcctagatataatggtggtacaggcattgagtaaacatttctatttcaaaagggataaattggccaaaagagaggagtaacaagccccatgcaagtctgaaacacagcagagcagacattaaatcttaaatctccaccataatctcctttggctctgcttcttgcatcctgggaacatgggtatgagggatggcctcctaagactttgggctggcctgtccctatggctttgcagggtacagcccccacggctgctctcacaggttggagtctattgcctgtggctttttcagactgagggcataagctgtcagtggctctaccattatttggtctgragggcagcatgacccttcctacagctccactaggcagtgtgctggtggggactttgtatgggggctccaaccccacacttcccctctatactgccctagcaaaggctctttctgagggctcttcctctgaagcaggcttctgtctgagtacccaggctttcccatacatcctctgaaatctgggtggaagctgccaagcctccttcactcttgggttctgagggcctaaaggctttgcactatgtggaagctgaaaaggcttacaacttgtgctatctgaagcatctggctggagttgtacctgggatgccttgagccgcagccaggaagtggggagcaatgccccagttctggctcatgaaaccattcttcctttccaagcctctgggcctgtggtgggagacctgcctcagaaacttgtgaaatgcctttgaggtctttatcccgttgtcttggctaygagtgcatgactaccatttagtcatgtgaatgtctctagcaagtggttgctccacagcctgcttggtctattctcctgaaaatggtctttccttctctactatgtggccaggctgtaaattttccagatttttacaccctgcagtcctttttattgtaaattcaaactttaagttatgcctttgcatgtgcgtctaattaactgtaggctgttagaagcagccatgccacatcttcaatactactgcttagaaattttcttctaccagataccctaagtcatccctcttaagttcaaacttccacggatccctaggacatggacacagtgcagctaagttatttgctagcacacaacatgggtaaactttattccagatcccaataacttcctcattttcatatgagacttaattagcctggccttcactgccaatgtttctatcagcattttggtcacaaccacttaacaagtctctaggaatttccaaactttccttcatctttcttcctgccttcctctgagacattcaaactcttccaacatttgtcagttaccaagtcccaaagctgcttccacattttcaggtatctttatagcagtgctccataccacagtrtgaattttctgtggtagtctgctttgcatggctataaaggaatatttgaaattgggtaatttataaagaaaagaggtttattttgctcacagttctgcggaatgtacagaaagcatctcaccagcatctgcttctagcgagagcctcaagaatcttccaatcatgttggaagacaaaggagaagctggtcaaatggtgagaaagggagcaagagagcaaggaagaaagtgccaggttattttattttaattaatttatttattttgagatggagcctcattctatcacctaggctggagggcagtggcacagtatcggctcactgcaacctccacctactggtttcaagcaagtctcccacctcagcctcctgagtagctgggattacaggcatgtgccaccacacttggataatttttgtatttttagtagagacagggtttcactatgttagccaggctagtcttgaacctctgacctaaagtgatctatccacctcagcctctcaaagttctgagattacaagtttgagccaccacatctggccccagggtcttttaaacagtcaggtctcacatgcactcagagtgagaactcactcattaccttgaggacagtaccaagacatttatgaggatccacccccatgactcaaacacctcccactagaccccaacattggaggtcacatttcaacatgagatttggaggaggagaaacatccaaagcaaatcaaattagctttttgcaatcaatgcaatgaatacatttaccgagtggtgattgaaattcccagcaatctgcaatgcactggaaatatagagttaatgaaatggtgggtgtggtccttccttaaaaagttaatctctctcatgtagttgtaaggcttttctttgtttcttctaatttcttaggacaaattgtgcaattaagaacagaaagattgcctgtattatgggaaaggatggctacaaagcactctggatgctttgcatggagatgctctgagctgctttgaatcctggtgtctgaaagccccagcctgtcaaagctcttagatcaagctatggcagcaaactccaatgcctctcccaaaggattctccttttccatccatcccacccttctccaatgtctactccaaggtgagcagaagtagactccaatgtctacctctactcacctggaactctgatgtctacttccactcacctggaaactaccatctctgaggagctcccattctaaaaatgatcctccccacatccaacgtggttgacctgaaagaatatctgatttgtttaaataaaaagcagcattcccaattagatcctatgccaacaacatgtagcctaggacttgtccacagaaattcttaacagtggatgttcttaggtaaggtttcagaccttaggcttcagaaattatatgcaaattttgcatatatgtgctcatttcttgaagaaatggtgaaattgagactttaagcttccttcagactctcaaggaagtctctgacacaaagaactttatgtaccacaggcttagaagaaatagctggagacctgtggcttgtaaatccttacttctcatcagtcacttggcctctggcaattgccttcctccttaagccttagttttcaatttggataacttcctctcaagttcattcaagatctagctattaactttcttaggatttgttcatattttcagtgttctcctcatcatgctccttgttgacaactcacattttataaattgtatcagtcattgaaaatatactattggggacaaattccatttgcttttaaggagctaaaaggcaattgaagaggaaactaacaacatccatgcaacttacatcaagtcatcagcttcatgacccaaccccrgcatgatgtcagttccaaagacaaatggcagcaacaaaaaataatcaagtattgtctcagaggttttgttcttagaaaaagtgtcattatacgtctatatacttcttcattccagtttgttgtttgttttttgtgttctgtgttttcttggtcactagaagggatcactacactgacgttagtacatcaccttttactcttggtacatacatgtgttcataattattgcacatactatatgtgtcctttgcaaactgcttttttaattatattttgaaatatattcatgttcatatatgtaggtatagtttatttatttgatcttaaggattatattgtataaatgtaccacaattattcatccattttcttctttgacatatttgcccaattaattgcaagattttgctgatgtgaatagatatctttgtttttcaaataygcatttctctgaatcacaagtgaaaatgagcatctagttacttgcttgggtatcttctactgtgagtttttagtttatattatttgcctatttttttatcaaagtgacagagttctggatactaatattatatcacttatgtgcccagcaaatatcttctcccagtctcaggcatttaactttgcttatacagacgatttaaaatgttaatatgtcacatttatctacttaactaacttttccwtgatagctgatagattttgtaccttatttcmttaatcctcctctgtgctaagattataaaaatattatacttctctctaaattttataacttttcttttcacattttggtattttatctgtatgaaattcttgaattgtattaatatgaagtagggatccaattatttcccacagccagttgaattaccaaaatttgttaaatagcctattcttaagtccatattaattttaatgccacgttcttcgtattccaacttygcacataatgcatgtgattctaggctttcccttctgccactggtctagttgtctataacttatacttgtatgggtcctgatgtcagctggcatgattagtcatcattccttatatttctacacttgtcttggtgctttcctctttcataagaatttataatttttcattcataaattcatatgaatttataatttttcattataaggttatttttaaatggtacctgatattatttttaatatggaagtttaattccaattttcatcctgattactggtatatttggtcawacttccaccactttctatcatatttttgtttgtcatgatttatctttgcttcctctagtttcctagagttctatttatattcacttaataaatagttaaacttgtactatgcttacacgaattaacagaatcaaaattggatcagtgtagcacagtaagygctccatgaatggggaaactatggctatggagggtcaactatactacgttattttatataaaggacttgagcaactacagattttggtatcagagtggggttctgaaaccagtcccctgtggataatgtgggatgactgtaatctacttctgaatatgtaagtaactcagacatcacaaaaacaaaacaggaagtcaattaaataccatcatcgaagacataagggaagactaacaagccacaagtatatactctaacaagttgtttcttggatggtaatctatttctttctatgttccatatctcttcatcttttaaatttttctatatgwttctgtgtgttgawttctatgtggcttcttcacatctgttttccaattccctaatgccctctttagctaatcatagctgttgtttaatacacccactgcattttaattttattcttataattttcatttttatcagtctattctggtttctttttaaatctgatttttctttttcccataggaggtcttgttctttcattatgattgtgatttctatctcttctgttacatttttattataaatatgttgtctttttcaagagtatatattatttttgattcttacagcatacattatcwatttaattttagcttctgactactcctacattgatttatttcctcctgttgtttctaattttggttaggaatctgttattcaatggatatctctttttctgtggaagttccttgtgaggatggttgtaaaagtatttctatagagcaattttgtttttgcttttcctggttcccagagaatggttgctttatcaatttaggattttcttatactcattgcaggatttaagttaaaatttgttacatgacattgatgtctrtatgtacaccttggccagcaagtaagctacrttggtattttcatttttagataggaatagttttcctaactccctatctacagcagaggaagccctctcagggtcaagcctgagcagaaaaaaaatgctaacagccacctaactttaaaataggacatttttttttttataattaacacatttccatttccttttttatgttcaaacttatcattctccagttttctacttttacaaagagaattatttgatattgaaaaattgtagacaattaattagaaaatgttaaatttggcatcacaaaattacccatgtaggtggggcagaatcttctgtgtgtatgattccattctttatattaataatcactgaacgtactgaacatagtttaactttgaaccatttacatttcttggagtatttccttatgtataaagtaagcatattgcaataaaagatatctaagggccctttcacctctaaaattctataaactttgacctttgcatataatagatattccataaccatgtgacctagactcagcttctaccatttcaaataataggagacagtgtgttacctcaagtcctcatagatgcatgtatgtgattctgtgttttctcacagatccatattcattcwttgattctcctacctatcagctgtgtggccattgttaagtgactcagtgtctccaaatttcagtttcttacctgaaaataaggttaataatgctgaactaaggttgttgtaagaattagagattttgaaagaatcagcaaaagttaacatctttttcccctcagtttcttcatctgtaatatcaagataatcattacaaaatcattgtaaagattatgagacattgtagtaaattgcttagtattaatattaaacctaataaatggcaagctaccataaccagctcagttcatggcatattggggtcccaggtggaaggtctccttggctaatccctcccttattcatcccagatttgcactcaccttcactgctgtttggcttcacagactattctgccattttttctgtggattgcattaaaacacaactgtgttcaccaccatacccttgagactagttacctgggaaaaacaattctcatttctgagtttttacttatttcttctatgatgctgaagtcatttctccattagcatgtatttctggtccctgtcttctttatgactctctcttccccaccagttcatagacccttgtttgtatcatgatctcctgtagttcttcctgggtcatatcacttatcatacatgccgtccttgtcttgcatgtgtatttcacatacattttcattataaagtaggaaatagctctcccatgttacagagcattggtatatagtaaagaaaaaaatccaaatgttcttttggcaaagtagattttttttctcatttgctttaataaagcatctcatgttttatatattggttaatataattgaacaaaattatttggctataacttcttcttaagatggactattccactttattatgattatttagaaaagattaatgcccaaaccattgagaatgtaattttttaaattgccctaattatttgcaccagagcatactgtcatgatcatgaccctcaggacaaacttcatttacctgatcgcagcagaaactcaagttctaatttgcaagtctgatcatagggctatgaagcccaggattgctgactatggaaaatttyatcatcatcctcataataataaatgattatgataaaggatcataaattataacataaatgataggctccaaatatggtattaggagcatatgtacatacatttcagtattcttaacaaacattcttcaaatccacaatacaattcccagtttttaggcatagaaagtaaggctcagaagggctaagtaacttccccaggttggtaattagctgactcaggacaggatcccgtctctgtgccccctcccccgcccccgccaactgcttgtgtgtttgtagcattccactttgcacacttcttatcatcattttctacagtaaatttgctgaaacttgacttcattccctgctcattgaatttaaaccttaatgatacatctactgatagaatggatttaagtttttgattggattacatcagcttttctgagthrgaaacagcactaacatgcatttttctaatataaataatattaataagttcatgttgaacaaaatataaaaaatcccaggcattctttaagttatttagtggtgatttctgggattttggtgtacccatcacccaagtagtgtaaactgtacccaatgtgcagtcttttatccctcaccatcccccacattttcccccagtccccaaagtccaatgtatcttctatgcctttgtgtcctcataggttagttctcacaaatgagtgagaacatactatgtttggttttcctttcctaggttactccccttagattgataatctccacttccatccaggttgctgtgaatgccattatttaattcctttttatggctgagtagtattccatggtgtatgtgtatgtacatacacatacacacacacagcacattttctttatccactcattgattgatgggcatttgggttagttccatatttttgcaattgcaaattgtgctgctgtaaacatgtgtgcacaagtatcttttttctataataactcttttcctctaggtagataccgagaagtgggattgatggattaaacagtagatctacttttagttctttaagkaatcgccacactgttttccatagtggttgtacaagtttacattcccaccaacggtgtaaaagtgttcccttttcacagcatccatgccaacatctattattttttaatttttttattatggccattctagcaggagtggggtggtattgcattgtggttttgatttgtatttccctgatatttagtgatgtggagcatttttccatatgcttcttggccatttatatatctgattttgagaatagtctattcatgtccttagcccactttttgataggattgctttattttttcttgctgatttgagttctttttagattttggatactcgtcctttgttggatatatagattgtgaagattttctcccactctgtgggttgtctattaactctgctgatttatttcttttgctgtgcagaagctttttagtttaattaagtcccatctgtttatctttgtttttgttgaatttgctcattctgatttaaaatgtgagttttgaatcataatttttatcactctaaaattaaacatctcagaattataaatttagaagagaaattatccaacaaattataattgacctttgctttagaggtattctraaagcctggtaattttatgtagccttgctacaaagccaacgttgaggggttgattcttgttaaaaggaagtaaggcaacatttcatgcccataggacatctgctctccaggtgacacatcagcaccatagttcagcaatcttcttactggcctggtgaaaataatgattaattaaaaggcaaacaagtgaaaaattcaaacatgatcatttcctttatgttataaagtatttattcatcaaatatttataaattgttttgctttgtatagaacaaaaattagatggatcctggtcttagagggtttacagtcctgtaaaaaagaaaatctatgtccataaatcactgtcttatggtatagaaaacaataagtggcataaaagagacacgttaaaaaaaaactttcaaaattgaattatttccagttgtcactataaagaaaagctttacaatagagggaggytgactcttgaaggagtgagatttagacttgtagtgtctttaagggctatgttcatatctatagagatgagatagactaagataaatggcaaaaggaagcacttgtaactattagagaaataactcttcagtactctgtgccaggcaatgtactaggcaccaaagtcaaaaagataagaagcacttcctatcctctagaagctcatggtctagtatttaggtgaggaactgagggaaaggtgaaaccttaaacaaagaaaggcagaaaaatgccaagccctcaagagcagcatcagctcttctgtttggaaagagggaaaggtattcaaaagcaggatcaaaaaataagcttggataggaagcccaatacattcatgtttcagttccatttttttaattgagcaagttcaaagaactttatgtatctaagatctacatgacacttgagactgaggttatctttcaaagtttcctaagtaaaagaaagatactggaggatctataacttacaatatgtaagttgtcaagatgacattgcccttcttctgattcaaacacatagcagtaatagaaaaaaacaaaaaattgaaattagaaaagctctagcagagtactccattaaattaacatacttaaccaatatgtaaattatttagttttcctatgctgttccctccaaaagacaattatacattaaatactttacgcaccccattccctagtgattgytgtctaatacgttatcttctcaataaaaatagttcttatgtttttatctaggcatgtattctgaaccatctcacttaaaatttactttcagtttcctctatgatctttattctatttggagtatagtcaaatcttaattgttgattttatcgactttctttgtaatagttttcctcaaatggtttagaactttrtttgcaaaggaatcctctggaaagaagcaataatgaaatagaaaacaaagaagagatgatcaatacaagtaaaactggccctttgaaaaataaaactgattgtattaaagaataaattagcaagactgattaagaaaaaagagagactgaatgagtaatgaaaaaataatgcaactgtagatacagtggaaagataaaactatggtactattttgatcagtcattttattacaccaaatatttaaaatattaagagatggatagttttcttaataaattaaattattaaagttgcttgaaaacttagtttgaaaccaaaacgaaccagtagctattataaaatgtctttcttagaaaactataggtataaatggatttatgagtaagtgatggtacatatatagtccaaactgtttcagagaatagaaaaataaagaatgctacccaattcattttatgaggctaatatagtcttaacatcaagaggagataaaaacagaagaggaaaaaaaagtataagctattctcatgtgtgatcatatatacaaaattgtaaataaaacatcagcaaattaaatccaacagagtattataaatacattgaactattttttaagtctttttcttccaggaatatgaccrtaggccactatcataaaaattcataaaaatctctcagtataattctgtacattgattaaagaaaacaatcacacaatcacttcaatagaagtaggaaaaaatatttctaaattttagcattattcataataaaaattcttatcgacctaaggatcaaatactcttaatctattgaagagtatccaccaacattctagcaaacaccttacttatggatgaaatgtaagaaatttttccattaaagacaggtatttagtaagatataagatattcaaggctactgctagcacttaaatttgttactggaaagaaaagagaagaatataaactataggttgattggaaaagaagaaaaaaaattgtcactatttgaatatgatatgattatatagatatttgaaaatgaatttccagccaaactgttagaagggtgtttaaaaggtttattgcacatcagatcaatataaaaacttgagagtgtttttacatatcagccataacaaaatagagaatataataggaaaaaaatttccattgataataatgactacaaggaacctctaactatgtacataatatgtgtaaaatggctttaacaacaatcaaaaaattataacgtgcaattcaaggatctaaaagattggatgaaagagaaagaatcacaatgtgcacgactggctaaagttaatataatgaagacattaatctcagattaatcaacttagtaatattctaattaaaattccaagagggtccaagaatcacaatgacattttttagaagatgtatttatacaggaatatattattgaacttgaatgagctagatttttccttatcaacactgaaaaatctcaaccaatcttgtgtgaaaaagcaaattgcagcataaatactatatgattacatttatgtaaaactttttaaaactcaaatgctatgtgttatgtggagatgcagataggtgataaaaatatacaaacaacaatcagaaaggatataaaacagctttgggaccttgattacctctagggaaagagggaaaaaaatgcttaaaagtgatgaaaattgatcttccactacatttgcctttttctcacaaagagagatttgttgaaagaatggtaagtgttaacatttgctaaatctgagtagaagcacatggcattagcattttaatattccaaattttatgaaatttttattgtgatattttataattttagccccatatttagccccaattttatttaaatattttataattttctaccccattttcttttttcagtatagctagttgggaacaaagggacagaatagagtaatctgcccatcatgagttcatacttccttctgtaggaactgctagtgtaatactggagcagtcaatagaaataatatcaggtgctacttccttgtacagagacagagaccaaaatctgtggtctctgttcatcagcgattttatagtatgtgccttcagcatcatctctctttggccatctcattaccttaccaattacatgggataaaagttgcaatatggcatcacccctaagaacaaaggacgctctctgtgtgatggaaatttttatacataaaggcagtctttttttcatctttttgctttgaacctttaagtcagctcaccctcacctttcttacctcttcaagtgtcactcttctccttccatgaccagatgttgaaagcaaatctggtttatggcccaccattctccagccgctggttgtttatcatatgactaattattataagtcaatagagccaagagatcaatacattttagagaaagttctctgaaacagaatttgtgaggatgtaaaaggatctttttgaaaagtttatcaktacatcaacatagcagacaaaaccccaatagctcccctggaccatgaaagtctggtaaagaattgtcaatccatgaaatggctttgacagctgttctccaaaccagttaaagggagctcttccaggcagtatgcaacactcatggtgtttcctattgacaaagtaccctaaagagtcatattgtgtgatgagtataataccactgaggcatagactggaaacacacagtgtgatctggccaatctctttggccagggagtagcccaggtggactgcccaccttcttcatctcaataagctttggaagtcatccattattcattgtttagagatcaataattaatggagattaaaagtttctttaaagattccagtaacttcacaataatgtcacaacagtaatgtggaagcataatggggtgttgtgtttatttgggaagcagaatttatttttatagatttttaaatgattttattaatgtatttgtagaatcattaaggtcctaaagggttcactgaattattattttgtattttcctacattttatgggagaaatgatgtgctatagaggtattcacaacttgagatttttggagatccaggatcttggttatatacttcagaataacttgctaatatacgattgaagttcaaaagcactttagtacttgagggtcttatttcttaagtctttgttttactttattttagacaagtttatgacttgagggggaaaaagagtcttgttcttgacctagctttggatgtctgagaacaattagcaaatttcttcagaggctaaaaataattggggattttcataattttacaataaaaatagagagttttgcattagaggatgggattggtctgttatcttattttcattttgcgttttcactatctcattcatatttttgaggcattatctgaacttctccatgcctcactttctctaaaagattgaaaaagtacatattaattattaaaatacttagagcattttgtagaaatgatgtgaaaataaggtaagataatgtcatgtgtactaataatgcaaaagtcatacatttattccagatctccagtgttacatcattttattaattgtcttgttagtgtctaaggcgtagaatggctgtactaaaaatctctactgtgaacttctaagaaaatacatacatgtgtcttttccacagtgttggttataaattacagttttggtggaatgagcaagatgttatacttattttagaaatatgcagctgactttcttattaactgggtaattttgttgttctgattcctaaataggtaggtacttctctctgtgtcttttggtttgggttccagttaagaaattatgaagtgagaaacttgtttcattaacttttcatatgcatgtgtgtatataaaatgcattgattgggactgactgctaaagggtaacatagggaaattattacttatggggatttattctggtgctgaaaacaagatattaaattatagtataagaagaagcataattcaatgaatttttatgatctgtaaagatgggcaaattgcagtgcaaatgataaatgggttttcagcatcaacatctacaaatcaatcatcataagtagatattttgatgtattaatgtaacgaggaagcagccctttgggatgtgcatgttatttttggtggttgtcctcataagagacagatacttattatgtgttgtgttaagggttttttttgttttgttttagtttttactataagtatctattctgaatatttttaggaaatgttttaatcccttagaaataagcttttttgcacatagaagtggaaatagatactaatttgattagctcagtatcaaaacaaagtaaaagctgataaaagtcaacaggacaggtgggaggtctctttctctgccttttccttaaagtcattgcaactaagtgtatccatttcccttttgtgtgaacttttgtttcctacctgagttgcaagttccatatcaaatccctctgtctgaagcttctcctactccagtatcattggataaataataaaataatgaacattcctgtttgtatttctttgatctactattcaaaattgtagcctaaaaattattaaaaaggtaaacaaagctttcatctactcattcttttaacagatactaacttaccaccagtagtcagggaccatgctggagcccggggaaacagtgagcacagcccctgccttcaaagaatatatggtaaaataaaagaaatacatatgcaatctggctcttacratgtactgtggtatttgcttgtagggagatgataaggtattatgggaacccacaggacaggcatctttataaactggagggcatccgtggggagccatgatggttgtcacagtgaaaaaggggtgagggaagacttccaggaggagctgatgctcaagtttgacttgaaaaatgtaaataacaggtcaggttatctgtggcaaggggagcaacatgtacagtggtccacaggttaatgggactatattcagggatcaataaggagatcaatctgttgacaggcccatcgtataacctgaggaaaaaagtggaagcagcttgatctctagaaagaacaagagacttggagacagcaaacctcattcctgtgcaaacctttgtctccttatttctgaaggtaggataatcctacatagagaaggaaggattgtataatggaaagaggtcaaggttatagccagacatagggctcaaattccaactttagagcttgctaattgtgtgggatctcgactaaacttctcagtcacaactttttcatatgttaaaagacaacaataacacctaaatacatggtaataagcamactggcttcttgcgatgcttayatgagggaatgtggaaatgtctacggagtccctgaatgtccatcagaggagcttaatggatatacttcctttccctttttgaaacttttctaatttctgaaatggagaacttgattccttctccctacatgaattttaagaataaaataaaattattcattgaaaataatccataaataagtgtagatatagtgcatgctcattatttatttttgtgcaggcatccatttaaagaaccccctgaagtctcaccattggtttagacattggactttttttctttgactccataattatccatcttgcctcctctacattctctgttcgatgaccccaggctggtcacttctttgcagtagcacctcctgtatgtagtcccagagtcacctgcactttttatggccctgtatgaatttgtaggcttggctcacatgccctctggcctcccctctctccctgatacagatcactgcttgtctttctcacacaccttacctctgcagtgggccaaccaagaaacatttccaggagattcatgttttttattttttttttcatttataacttttctttttttaaaattatactttaagttatagggtacatgtgcacaatgtacaggtttgttacatatgtatacatgtgccattaattaaagtttcatgggagtcttggaagcacttgtttgctttaatatgtgtgggctctttactctcttcctaacatatttttgttaaaaccaggataaatctcagagtggctatcaggttatctgtcttaagtgcttcttgcccctccttatttttgacctagaaaggaggctagtagccttgaacctcagggtaactgttgccttcagggtcagccaaatggaaggctgccctgagctctccagcacaatgacttcgctgtaacattattatgtgtatttttcatgaagataaatgctgtctcccaaacacccatttttatcatagaaagatgtgaatggtagaaacttaaaatctgcttcaggcaggatagttttgagaagatacatatctaaccctaataaagttgggctgcctcatggcctatttctatacagtgcagcaccctaaagaaaacacaaatccactttcaaaaatttataataatctttactagaatgtctyctaaaaatggtaagagattacgtggcatgacagggagcaatatcccctattaaaaaaaaaacttccctatagttacttatmctttaattgcttacagaaaggtgcaacagcaacggcagagaatatctactatctcatgtagtcttattcacttcactgaaaaacaccaaacacagttttcttctacttctttcattcactcctctatcttccaagatctctaagttgagctctgcatttttagactaaatcaatataggctttctgtctcttttagttctgcatcacaaggttgaaaaaacagcatggatagtctatggtttggcaaactttttctataaaagaccagatagtgaagattttagggtttgcaagccacacaggcctctgttgcatattctgctttgttttttacaatcctttgaaaatttaaaaacattcttacctcataggccacacagaaacaggcctcaggctggatttgacccatggaccatagtgaactaatccctggttaagcaataaaggcaccaggtcttcgtagactaagccctagtgagacaattaacaacaaaaagagtgctcagtacatgtcaggcatggtatcagcagcttacttatcttagcttggttagtcctcagaataacagtttgagataagtactgtactgtttcattgttaataagctgaggcttagaacactatacccacccccaccccccagccacttgatcatctgtagtcgagattttaatcctcattaccgtttaacttgatacaacatagagataacttaacctctcttaatatttgaacctcagttccctaatctataaaaaagggatactattattaccctcataggtttatttgtgaggattaaatgaactgatatgcataggcaatatctgacacatgcttatatgttccatacttatcagctctatcattatttcagtgaatttgattattggtccttgttgtaccacttgccagccatatgaccttcaagcaagccatttttatactctgtgcttatttcctcttaagtgggtgttaacagcatttcaagattactctgaagatccactgaagagagctagcgaaagtcaaagagacatacaaaagtaaagcatagtaattaccattaattcatgactgtgtgcctagcttcatcttgaggtctccagatccattatcaatgtgtttctcacagcaagtttataaggcaagcattttgacaagtgtggccactatctgtgaaagcacttgaaagaaacaaggtgttaaactcatgtgtggatttattgctttcactacacctgcatgaaaccaggatattcagaaaccataggtcttgctctcaaccttcatmttcatcacaggcttcgtcacatcagtggcccagggcttgaggacttccttaaaatgttgctcacatcatgaagtccaagatataattcccaatagtgattcttaccttcacaacagcatcacctgttaatttagcttatgattattaaaatgcaaattgcctattttgtgaattatctgaacagaaagaaaaaacccttagcacaattctgtgtcatgcttcattttcaccatagagccagagggactaattattgattaagaaacagttacgtgaggagaggaatgatttcctaggattgctcattgtcagagtttgatccgagaagcagacctgataggagctgtaaagagtaaagaattattccaaggattggatgttacgcaattgtgggtgctggataaacagtctatatgaagctactgcttctgtgtcttggtgctagagcctgaagcccacatgtaaagcagtagagaagaaaagacagatgtgaagtcagggaaacaaggacagaatggacaggctggaacctataaggacagctgaaacatacatcagtctctcaccatacccagctttcaactttgatgatggaatgatctgcaggaagagctggcatccttcttcacagatatgaacacacagaggatgtccagcaggaactgaaggtgctgcaggcccagtcactgccccacactcacaactcaggctggcagaaaagtgacaaggcttgtgcactacaccagtgcctcatactcaacaccaatcttgcccacataaaaagaacatggctgacaccttacttctgccttccagtcccacacaaaatgtctcttgtggcccacactaactcggaactgcagcaaaagaacattttaaaaacaaaattccaacttagctacattgccgcaacacatatccttcattttcaatacctgtgtgatgatctagaactgttttccctaactcttagcccagaggttttcccacaatcctctgctgctctgaacttcctactccataaactagaagaataccttcctcatggagtgattgcacaagacagtgtttacaaagtaccccaaacaacgcttgcttggcattctaaaaagtactatcttctttttcttgatgtctacttagagatcaagaaaacatcattaataagaaatgtacatcttttggagggaaaaagcatatattgtgttactcaagacaagtatcattaattcagaaccacccatgattttagattattcactccattaattcccattacaagttggtaatagagagtcagttacaatttcacgagactaatttggaacctggctttagctccagtttatgtgaagtggaagaaatgcactattctatatggaagagagagagaagaggtggagagactcatttgattactctcagctgatggcctgcctgacacccctggattattactgagaattattctgtgatcaaaataagttgattaaaaccagagtcctagcattaaagtggaattaaactacacagtgtgattttaatactagactctttccctgtggtgtgttgcataatagaaaccaattgaaaacataggtattaggacaaataaatataaataagttgatatactgcagaaagtgggccaggggagcccacagtgaaaaggggtactgccagagtttagagcattatcttttaattaataaaaggaaaatgagaagagaaatccactcgaggaaaaagggatggtgctctaattttataaggttggtgttttatgggataagaaattcccagggacaggcattaaaagaaagtaaagttaaatttattcttggctgactacactcmatgaagaactgcaggagggcaaatacttgtatcccattcttttctggatggccattctcttgtcactagctatctacagcacctgcagtctgaatgtgtaattaagcacaaaattattatactactttcattgttccttcatttwctcccatgagaagtcatttttatccttgatccccagtatgtagcagtctagggtgggtgaacaaaggacatggttctgtaaagaacataggctttgacctgggtccccacctaatggaacaacttagcatcccaatccttcctctgtctgtctgcactgggctgggtccagggcgacctatcttttaccttggcagatactacagttaatatgctgctttccagtttgccacttgatagccatgatccccatatgtttctgtctcttggttcccactaggaaagtgaccttagggttatcacaggaggctgacattgttacaacagcttatgttgactttcttccattactctgagtgcttctttcactgggactctggtgcgatgtttactcagtggtgtcagttttctttgatgatccctgaaactattgccctgttcttttaattttttagaccatgctattttaaatatgatttctcccagtttgagtcagataacatttgtctcaacattgtgttacatctaaaattcttttcacctcacatacacacacacaaaaatcaacatgtttcatgaaagaatcttggacagcttaactctcttctacctccagatgagttttccatcccctggagagtgtgagaagaactttgctgagcatgattgcaaatttcaaagtacttttttccttctttgtctcaaggtatccataggttcctcatacagacaaaactcttggaaaccatttagctaccctgatagaagtagattttcatcaataattgattatccatggaccaaactaagaacataccatctactacttttttacacttttatgtcacctggcatgatgcaaaatggaattatatttattctacacatacttattgagacttactctgtgccaggatagtgctaggtatgcatggatgaacaaaacagcrctaggtatggatggatgaatgactcattacaaagcttatgaacaagtgcagaaaaatatagccaacaaataatagatctacaatggtaaattagcgtaagtactatgaaggaaaagaaccagattctatgagaaagatgatagcggggatcaatctggattgaacatctagaaagatctcttgaggacattgaacataagccaaarcttaaaggctgagcaggtwccaaccagacagagggattgaaagtcatgaagcttaaggtacaatctartmtctgtcacctagaagctctgaacccctagcctacatctgttggctgtgagaaagttagatattttcagaaatttattaacatctttagatctgggggaaattgttgtgcatattacagaagttctcttggtgacgtttttatcacctgtgattgttttgtgtttggctggagtggggtcctcagctgttatttacaaggtaagtttttgctctcatttggggtaccctgctgtggttgggtgtagccatctgttagccctttacaaggtgggtgtcaaaaaggccaagtgggcatgatttctgatcaactgaataagcatttttatgaagaagatggagtcaggaagaaattcttaccaagtagagaaaagtacatgctgtgagctacagataatttaaagaagagggcatgtttagggaattaaggaaagttttgtgtatcctgaaatatgagataggaaattaggctggagaaatataagagggccacactgggaagatttaaaccatgggccatgtcgaggagattgaacttgtttttgtgaataagtcagaccaaatggaaatttttgaaccagcaccgcttaaaaataataataatttaaggaaggaagatactagtggcaaagaggtgattgtaattgtctaggctagagatgtggaggacctagttcattgacagaagagatatgagctatttctgaaggagaaaacaccatttaatataaaaaggtgaaagaggagaggggtatgattgtgaagtgtggaggacaggatggatgatgacaccatgaatagggaatgtgggagggtcaccatttgaatgagctgcttcctcattggtgctcttcctctgacatgaataactacttacatatttgcctctcttggtttactgggagctcctcaaggacaaaaatgctttatttattactgaacccacagtacaggtgacaaggcatatctgaggagttcagttaagtagtaactactattatcattaagctttcaatagttgtgtttgagtgaatgcatggatggcaggcttttgacagtataatagtgagttctgaagactccagagagaatgatgggaagttgattgagagaaattctctttagatgaatttatttcaagaaggagaaaaatgacagctccttggggaagaagaaatgtaatatgtgaggagacacaaaagctggcccagttaggttccactgctaaaagtcagccactggaaaagtttgaaagcaagaataacacaggaawtcagttctgaaaatccaaccatctcagttgagtcatccttaggcctggatagtcagagaacctttgcacaaagaacacataactttctcagatattacagaaattttggaattaaccttggctatacttttctctgtttacatcctctttttgttagacccaattccccttatttagggaatgtcaccaaatgtaaggatttaatataactttcaggaaaatgttaaagtggcctgatgaggtttttaaaattttctcaatggttgaatgatgtcttctcctaatgaccaaatttcaattatttagttaaatcattgtttgcatatttttttaaaaaatgctaccccatataaataaaattcagcatttgtgtttcaagcatcttattccctatttttttaacttatttgtagtacgtgaagcacaacataaaagcaattaacaattttaattraagaatgacatttttctaataatccaaatgctgggtgttgggttttattttatttctcttggttgttttgtttgtaccaaatattttataacttgagatgtgagcaataaatcatattacatggttttactcctctgtgataactttgtgtatcaaccataatcttgatattttatcagttttattctctttcttcttatatggctacgcctatttgttgatctctgggttgccatcacattcarttccattcacgcatcttttgtagtaaactataggaaagaaaaaaagacctatagaaaaggaaaattggtgagtagtaaaagtctagaagaaaataaagtctgagaggtgattctttaacactgtttttagaaaagggtttctggcccatcttattaaagccattctccttgayagacaaaactctaccatggatatggatataatgaggtaggtgttttagggtctaatatcatamaatatttaaatcattcaattctttttgctggaagtccatacttgagtaacttttgattaaaatgtagatttccctataatttttaataaattttagggcaagctgacaagagtatttactataaatcaataaattggtctatatgtatatagtttattctaaatttartctgtgtagatcagatactcaagtccagatctctgtagcattgatgagaagtttctggacttccaaaattagaaaccagatactgaactatagtaaattcaccaaggtagccttccagcctacctctcctaaagacagaccaatctcatttcatactgtctctcaggacttctgcaaaccttcagtcggatgtgtcctgcccaaaactccttatattagagttgaaaaaattaaagcctagaaaagaaaygtgayttgactaaggtcacgtgcaaatttggtctcttgccagatctatgttcctttcattataccatgtagggtcttaatacatcattatccttggaagtctaaggaaacaattcaacaaataatccaagtcatagggggaaaaaaactcttggattatgtatcaatctaatccctactcttgtacctcaatggaccatggggctacatgcaattgaatacactctgtgccctttttctttctgatggagtcggaacctggacaatatctattcactctttaagattcaccatttgttgcctccagtttcaaagtttttcccatttctccaagtagagttagtcattctcccttctgcccatgtgtatctctgttacgtgccatatattatatgccacatgatattaaatatgtacctattttattgcctttaagatgtgaactactctaaaagagtaactactggttccttatctctgcatgccagcacccatcacagcatctggcacttagtaatttatcaataaaagaagagagtaatttatcaataaaagtaatttatcaataaaagaacaaaggaaggagggaggtagaagagagagaaaaagaaacttgagtgcatcttccactgggagagacttctgtttcctcaactccagattacatgagaagaggaggtgtataaatttaggcaaaatcacatatgcagctcaaaataatacttatttttaaggctgatttggaagaccttgagttattttctcttcctatcaccttaagcagaatacaatgataaataattagaatttttcttcacattccaccgtgaatttaaataataatgcccttagaacacctgaggcactgrggaggatttctgttcatggttacacggatgctaataaataactatatcagttctccaaagtgacctcatgtcagagctgaaggatagttggttccagtggcaactgagatgctgcatcagttgaacagatrggaaagaatcaaagtgtatgcttcagaagaggtccgtataacattcagtgtcagagacaacagtagatgttaatccagcagagcgaattctgtagtggggagtgaaatattatttaatcagcagtgcttcatacataattcaattaactrccttcactcatcagtattaacgacaacaggagcttggattaatgtgcacgagcctcataaaaaagctcccagactacctaagtgctgccaaaacttaataaagtcctgccaatcaaatcctggtatctggacccaatgcatcagtgcactgatattacaaattatcccaagcacttcttattgtttcctaattctttaattatgctgatatctgcataaaatgtttaattagtgtatgggggaaaccgagtaagattgcctgccacttccttgcctatcagtatttagcatcaagtaaacaaaatcgaattttatcgcgaataatttttaaagrcaagttcacctttttttattctgtaaatcttgataattgaaaaggaaasagcaagttgggttataacaatctaaaaggctgagagggtattgaggatgccagaagactgagtgctcatctatccattatcttttagttcagcctctggactttgggaaccttagttttgtcctggttgtttttgtttttctggtgtcaggtattggagatgaatatgtgatactaacaatcaggtgatcagggccccttgaaagaataaagagattgtcattactctggatttttgagggtgaatggatattagcctgcatattctggtcaagttactattttagagaactggtgaagaactatgcctaatgtgctttaagattatgcctgaaatcagagaatggaaggtaatcagtccagcctttacagcatgtatttactttacaagttttgtgtacttcctatatatcaggaactgggctaagctataggcatatagagaaaataaatagttccagatctcagaaaagcaaagacctactggaggagacatatgaatatgcagagaaaaataataaggtcaagagtgaggataacaatgatggtgatgatgaggatgacagagactactattgttttaactctttgtcagtcacagtataaattttgcttaagcctcataaccctttaagaggggtattgtaactccttttttttatagtaaagcaaaaatgaaacttatggacacaacaggacagtggttgcctccaakgagggaggaagagaataggattggaaggttcacagctatatcagaaacatttatagatctttaaaaaccagaaccaaaataatataacgaatgtcaacattcatgaaaaattgagtggtagagtaaatcacggatgttttacttctyggtatgttagaaatgttttgtaataaaaacaaaggaacagtgcccaatttgcagttaagtgaataaggtctgtgatggagggccgcagagataggtgagagggcagagctggagtgggcagaggaggggtggttatggaaagttttccaaagactttaggaatgcctagcatcaacaaaaggcatttatttatttattttgaaatggagtttcgctcttgttgcccagtctggagtgcagtggcgtgatctcggctcactccaacctcctcctcccaggttcaagtgattctcctgcctcagcctcccaagtaactgggattacaggcatgtgccaccacgcccagctaattttgtgtttttagtagagacagggtttcttcatgttgggcaggcttgtctcaaactcccgacctctggtgatcygcccacctctgcctcccaaagtgctgggattacaggtgtgagccaccacgtttggcttaacaaaaggcatttattaagcacctgtttattcctggcattgtagtaaatgcccaagaagggaaatgaaactaacctagaccctgtcctaggatgttgatgatgtagttgtaagtaaatacaggggtcattgcatacaaagattattcagcaagaaatacatctgaaatagatctaaaggacaaataacattttggagggagttgacatggatgtgtttgcagctggccattagaaagtttaaaatagggataatatcaagttgaggcctcaaaattcctgtagttcagtaggaaatatattgaaggaaaatgctaatggattattatttgtcaggtgctggactctgcactacattttccatcatttttctcattgctgtcagaaaccctaggtgataagtcaaaatgccaaattacagatggaacytgagattcatagtgtttatctagttcacgttgacacagttaaaaacataacgttcagagagcytgagtaacttgcccgagggcacacagcccttaagtggtgagggtatatgcacaccatggtcgtctttgtacctctcagaaaagggcagattcttctccctgtttctggtatctgttttatttgaggcaaagactggggccatctatgatacaagtggtttttctgacctggcagcacctcctacgaaaagcaactaggtgttgacagccaaagcgtgcatccacctaagggtacaaagaacttccctacccataactctcaagaacatcccagccactttattgcagtcaaatgagaaatagagagttgaaatttccaaaggaagaagaattggaccctttccaaaaagcagtcatgttaactgagcaaatgtaaatggaattagattgattagaatgaaaagagaatctgaaaagaggatcactaattgatgtrcaataaaatttaccacctagatatcaagaaagtggttgtttggacttagaattatctcagttttgtactgtctcctctcctacttcctttatgggcatttcactgattagcacaacttctacttgtaaaactcagacctgttaggttatcatttakactaattttttttttaattaggaaaacattttagcaaaaattctgtttggatattatagaatttcataaatgttttcttaatattaatgtgaaatgatagacacagtgatagcacctggcaggtgttctgaccatggcttccacacaataatatgtctactagcacctataaaacagggatcttgagtactggaaattctggggcaattggacctggaagggcagtcctagcaggaaaacacaaatgaagccatccctccctcccttctttacaaaaacatttactgtattaaatagttgtagaaaaaagatgtataagctatatatctttgaagagctagatgtatcttaagtagaagagacagatatataaacaaataatggttggttaagacactggattctggaagcaggctagttggtttcaaatcccaactccactaattactagctgggtgatattgagcaagttacataatctattagtgcttctgttttctcttctgtaaaatgtggatgatagaacttgtaaagcattagcacrcagtaaccagcacataataattkctttttggaggaatgatggacatgaagagaggattacagcagaaaacaggttaaggaactgctgaagagcttctagaaaatgattgggctggatataattagtcttgctactcaaagtgtggtctgtgaagcgagctgcaacagtatcatttgagtgcttgttagaaacagattctgttcctgtgttagtttgctaaggataatggcctccaactccatccatgtccctgtaaaggacatgatctcattcttttttacagctgcatagtattctatggttataggtaccacattttctttatccagtctctcactgatggacatttaggttgatttcatgtcttggctatcrtgaatagtgctgcaatgaacatactcatgcatgtgcctttatagtagaataatttatattcctttgaggccattatctttggcaaactaacacaagaacagaaaaccaaataccacatgttctcacttataagtggaagctaaaaggtgagaacacatggacacttacaggggaacaacacacactggggcctttcagagggtggagcatgggagaagggaaaggaatcaggaaaaataactaatggatactaggcttaatacctgggtgatgaaataatctgtagaacaaaccgccatgacacaaatttacctaggtaacaaaccacctgtacttgtaccgctgaacttaaaagttaaaaaaaaaaaaaaaagaaacagagattctgatatagtagctccaggataaggattaagattctgcatttatttttttctgggtgaagccaatgcagctgatctgtgaaccatattttgaagaacaaggatctagaacacactgtccaatatggtagatactagccacatgtaactgtcaagcacttaaatatgaattgagatgtgctataagtgtgaagtacacacaggatttcaaagayatccaaaaaaaggtgaaatagctcattaatatttttatattggttatatttttgaaactataatacattggatatactaagttaataaaatattaatttcacatttttttcaatgtgcatactagaaaatttaaaattatatatgcatctcctattgtatctctattgaacagtgtgccctaggacatttttaccaacagatttccctataatatgtgtatctctaagtattgtacttagaacctgacactagtagaaaggtaaaaataaagaatgtttattcttaggtaggagtaaaggacccaatactttaaaaatgatttttattttatttcttattacaacagtgttgcatatttactgcatgacagttttaaaaggtagaaacagaatggaaaaaaaattaaatcacccacaaaaaccaccacaccaaaacaaccactgtttaaattctgttttataggtactcaacatctaataatatacttttaaatgtactttttaacctccttttatgaggatctttcttcatgggcattctggaaaccatcctctcttggtttttctcctatcttactgactgcttcatttcattttcttaccttatttctcttcatcttccccaccaactatacttgcatatttaataagtttctcaaagtttgtgtctaaaacccaactcgatttctgtctcttaaccagacttcttctttttcttttttaacttagtggttgccctggggtttgcaaaatacatttacaactaatccaagttcaatttcaaatacaactatacaacttcacaggtagtgcaagtttcttaaaatattcccaattcttccctcatttcccttatgacattactattattcatttcacccacccataaattatagtcacaagatacattattattttgaacaaacttatctattagagtattgaagaataagaagcagagaagattttattttaccatttattctttctataacattcttcctttcttatatagacctgagtttctgacctatattatttaccttcttctgatgaacttattttcacattttttgcatggcaagtctgctgatgacaaattccctcaaattttgtttttcccttgaattttaattttcatgtatttttactgtacccctctcttaatcgccttggtgaatagtttatctattttgagttgttatttattgctgttacttttttccatagaacaaaatatcagatttggtagtcagatctgcagtttttctgtcttttttttattttctgcttttatctggcacatagaatattctgaataaatatttgttgaatggattattaagtaaatatttcctcatccttttttaaaatcttttctacatttttttaaatttttttatttccacaagttattggggaacaggtggtgtttgcttacatgagtaagttctttagtggtgatttgtgagattttggtgcacccattacccgarcagtgtacactgcaccctatttgtagtcttttatccctcgcccccttcccaccctttccccaagtcctcaaagtccactgagtcattcytatgcctttgcatcctcatagcttagctcccactgatgagtgagaatatatgatgtttggttttccattcctgagttacttcacttagaataatagtctccaatctcatccaggttgctatgaataccattaattcattcctttttatggctaagtagtattccatcataagtagtattccatcatatacatatttgtatcacagtttctttatccactcattgattgatgggcatttgggttggttccacatttctccagttgctaattgtgctgctataaacatgcatgtgcaagtatctttttcatataaygactttttttcctctgggtagatatccagtagtgaaattgctagagcaaatggtagttctatttttagttctttaaggaatctccacagttttccatagtggttgtagtagtttacattcccaccagcagtgtagaagtgttccctgttcagcacatccatgccgatatctacttttttttcattttttgattatggccattcttgcaggagtaaggtggtattgcattgtggttttgatttgcatttccctgatcattagtcatgttaagtattttttcatgtttgtcggccatttgtgtatcttcttttgagaattgtctactcatgtccatagccgactttgtgatgggattatttgtttttttcttgctaatttgttgaagttcgtggtagattctggatattgttcttttgtcaaatgtatagactgtgaaaattttctcccactctgtaggttgtctgctctgctaactcttccctttgccattcaaaagctttttagtttaattaagtctcagctatttatcattgtttttttcttttcttgcctttgcttttgggttcttggtcaagaaatccctgcctaagccaacatctacaaggatttctctgatgttatcttctggaatttttacagtttcaggtcttagatttaagtccttaatccatcttgagttgatttttgtataaggtgagagatgaggatccagtttcattctcttacatgtggcttgccaaatatctcagcaccatttgttgaatagggtgttctttctttactttgtttttgtttgctttgccaaagatcatttggctttaagtatttgggtttatttctgggttctctattctgttccattggtctatgtgcctatttttatatcagtaccatgttgttttgttgactgttgccttatagtatagtctgaaatcaggtaatgtggtacctgcctccatatttgttcttttttgcttagtgttgctttggctatgtgggctcttctttgcttccctatgaatttgggaattgttttttctagttctgtaaagaatgatggtggtactttgatggtaattgcattgaatttgtggattgcttttggcagtatggtcattttcacaatattctacccacccgtgagyatgggatatgttttcatttgtttaggtcatctgtgatttctttcagcagtgttttgtagttttccttgtagaggtctttcacctcctttgttaggtatattcctaagtatttttgtttttttatagctattgtaaaaggggttgagttcttgatttgattctcagcttggttgttattggtgtataggacagctactgatttgtgtatattaattttgtatctggaaatttgctgaatttgtcagttctaagagctttttggaggagtctttagggttttctaggtatataatcatatcatcagcaaacagtgacagtttgacttcctctttaccagtttggatgccctttattttttctcttgtctgattgctctggctaggactcccagtgctatgttgaagaggagtggtgagagtgggcatccttgtcttgttccagttctcagaggaaatcctttcaackttttgccattctgtattatgttagctgtgggtttgtcatggatgacttttattacattatgtcccttgcatgccaattttgttgagagttttaatcataatggagtgctggattttgtcaaatgctttttctgcatctattaagatgatcatgtagtctttgtttttaattatacatatgtggtgtatcacatttattggcttgcatattttaaaccatccctccatccctggtatgaaacccacttgatcatggtggattatttttttgatatgttgttggattcagttagctagtattttgttaaggattttaacatatgtgttcatcaaggatatcagtccgtagttttcttttttggttatgtcctttcctggtttgggtattagggtgatgctggcttcatagaatgaattatggagatttccttctttctctgtcttgtagaatagtgtcagaaggattggtaccaactctcctttgaatgtcttagaattcttagaattttgctgtgaatccgtgtggtcttggactttttgttggtaatttttaaattaccatttcaatctctctgcttgttattagtctgttcagggtatctaattcttcctgatttaagcaggaaaggttgtatttttccaggaacttattcatctcatctaggttttctagtttatgtgcataaaggtgttcatagtagccttgaatgatcttttgtatttcagtggtgtcagttgtaatatgtactgttttgtttcttagtgaggttatttggattttctctcttcttttcttgcttaatcttgctaatagtctgtcaattttatttattttttcaaagaaccagctttttgtttcatttatcttttgtattttttgtctgtttgtttctatgttatttagttctgctgtgatcttggttattccttttttctgttgggtttgggtttggtttgttcttgtttctctagttttttgagatgtgaccttagaatgtcagtttgagctctttcagccttttcaatgtaggcatttagggctatgaactttcctcttagtaccgcctttgctgtattccagaggttttggtaggttgtgtcattatttttgttcagttcaaagaatgttttcatttccatcttgctttcgtttttgacccaaaaggagcaggttatttaatttccatgtatttgcatggtttcttcttatttgtgtttgttttgtatctcttttcccatcatactattctgtgagattgtatagagaattatagatgcacatttcttggtgaaagggtagagtgctttcattacattagtagtctaatagaatcagaattcattaaaacttgaaaaacactagaataagaataatttggggaagataatcaaatacaatagtaatgatagttatactattcaaagtcaactcttgcatagagacttcgtgttggaaatatttgccaaaaagaacagaaatcaaggtgaggtgctcttaccaaaatagttgaaaaggtctttcacctttttatatggcaagcttcccctgccacccaagcagtgacactactgtccttgatttgttggcataggattttaaaaattttatctccaatcatgacagtgtgagggactaacaaagtcattgagtttcattattgttgtccaggaactaaaccatcttgttgctgattgtttgctgaaactttacctaattatagtgttttttatgcttgatatacagccagacatggtgtcttattttgttttgcttttgtatatgactttaaatcaataaaaagtaaacaaataaaaggtgaaatacatatgcagtcatctggaaaaaaaaacaccttttttatttttttgtaaactgggattcacaaaaacaaataagacctgccatccattctcagagttatttaagtagagtatattattgcattcaagagacagaagaggtactctaggtacagataatttattaagatttccaatgtacttttgatattgcatatcatactggaataaatcagacaaatcagaaagccttatgtgagagagattgtgtacaataatccccaatttgtttttaggaaagaaagaaaagttattcatgatgacagaaaccactctctgttatgaatgccctagataggaatatagcttgaaaagtgttcaggtttgctgatgtgaagaaagctgacagggaacataaaatggtgagtaatctggacagagttagtttcatggtggataaatggcacactctattaagggtgaccaaatataaaacacaaaagagtttaaaatgaaatataaaaaaaaatttcctataaaaaattgaaagcagactcaaagatgtgaaagtagattaggcttgagataaaaagcaatattactgtagaggaaaactcgagaaaaaataatctaaaacataactgaatatcttaagctgaaattatctttataaagttggcacctaatctaattttaggagtgatggtatttcaaaatttctgctttctacgggtcattggtccctcatcaaacagttatttgacatgtactgtgaaccagaccccagggacaaagattaatattacaaaatacctgccctcaatgagctcctagtcctgtaaaaaagagacatgagcaaatatatttaaaatacctaaagttgatgatgtaatttattgggaaaaggttgtggtatttgccagtcttgagtgaagagtagggcagagtagggctttaaccatcagggaaaaagagagagaaaacattccaaatagagaaagagacataaaggagtcttgaccactagacacagtttggaatggtctttgcagttacaaattagttcaaccaaagtttgaacatgtgaaactgggatgttctttactatattcttgacttaatgctttgtttttaaaggttggaatgagtcagggcattacakttccctccctggacacctttaactcatagacacaaaaggctccatcataartgacagaatatagctgaatgtgtggatagaccctgattgcacaatttaagtcaaccaagaagctgaacacaatgtggctgttgatagtagtgatgagagtcttcctaacttcactgcctttattgccaccacagctaaatcctgagggggaaggttgcacacagtagacacactggcaaatgttaaataccaggaaaaacactctgtgaaagcacagtgcctgtattatttatgcataatttctccttgatgtttacctggcccctatagttctaaatgtttgaagagggaggaaatgttccaaataatttgtatagtctgacagtataagttaaaatttcatgattaagaatgtagttccacatctgatatttgtttaatctataagtctgaatggcaattttccaagtgtgccttaacttcttaataccctcatatattacatcatgttgggcttactgtagaaaatgttagggaaaaatatattaaataaattcagctggttttctgaattcagcccatttcttcttatcatttaagtgagttcttttgtcttatgcagtatcttcccagtgttctgaccaatttcagtactgtcaaaatctgctattttgattatcatttgttgtacatcccagtaatgggggagaaaagaaattaaatggctctcctaggaaaggcagaagcaagtatcaggttttattactaatcacatgggtagtcttgtagaaatgaaaatattatttatttacagtgaaatgcatatgccatagctgtaaaattcagtgaattttgacaagtgtaaatgtctatgtaatacacctccaccaagatataacactttcattaccccagggaatttccttggatcctttctcaatcaaccactctctcagagagaatcaatgctctgattcctttcaccataggtcagttctacctatcctagaatttcatataatatagtcctttaatatgtattctttttctgtttgacatttttgctcaacatcatgtttttgagattcacgcatgttgcatgtgtcaatcgatctttgctttttacttccagacagcatttcactgtacgattctatcacagtttatctattttccttttgatttttgatgaccatttggggtgtttcagtttggggttatgatcaataaagatactatgaatatttgtgtgcaagtctttatgtcaacatagattttaatatttattgggtaaatatttaacagtgaaaaggctgaatcttatggtaggtatatctgtaaccttttaagaaactatcagaacttccaaaatggcagtaccattttatacttgcaacagcaatgtatgggtattggagttgtttcacctcaccagcatttggtgtcaccagtgttttcaattttatctattccattgggtgtgtagtgataatcaattgtgtttttaatgtgcattttccctgatggctaatgatgctgaatagtttttcacgtgcatgttgtctagttgtaaataactgtttgtgaagtaactggtcaatggaacggaagagaaagtcgagaaatgatgctgcacacctacaactatctgatcttcaacaaagctgacaaaaacaagcaatggggaaaggactccctattcaataaatggcactgggaaaactggctagccatgtgcagaagattgaagctggaccccttccttataccatatacaaaaaccaactcaagatagattaaagacttcaaytgaaaatctaaaactataaaaaccctggaagacaacctaggcaataccatcctagacataggaacaggcagagattttgtgacaaagacaccaaaatcaattgcaacaaaagcaaaattgacaaatgggatctaattaaacttaagagcttctgcacagcaaaagaaactctcagtaaatagacaacctacagaatggaggaaaatatttgcaaactgtgtgtctgacaaaggtttaatacccaatatatataaggaacttaaatgtataaaagaaaagcaaccccattaaaaagtgggcaaaggacatgaagggacacttttcaaaagaagacacacatacagccaacaatcatgtgaataaaagatcaacattactgatcactggagaaatgcaaatgaaaaccacaatgaaataccatctcacaccagtcagaatggcttttattaaaaagtcaaaaaataacagatgctggcgagggtgtggagaaaaggaaacacttatacactgttggtgggggtgtaaattagttcaaccattgtggaaagcagtatgaggattcctcaaagagctaaaagcagaactagaattcaacccagcaatcccattactgggtatatacccagaagaatatagatcattctaacataaagacacatgcatgtgaactttcattgcagcactattcacaatagcaaagaagcaaagacttggaatcaatctaaatgcccatcaatgacagattggataaagaaaatgaggtacaaatataccatgggatactatgcagtcttaaaaaacaggaccgtgtcttttgcaggatcgcggatggcgctgggtactcatctctgggtactaatccctaacaaacaatagcagtaacagaaaatgtagctcctgcatttcatggaatccatgtaaacaaataaggcctgccgtccattctcagttatttaagtagaatatattattgaactcaggagacagagaaggggtattctagacatagatgatttattgagacgttcgtgagatttctgttttcattcttatgaaatgcaggaatagaaaaccaaataccatgtrttctaacttataaatgggagctaaatgatgagaagtcatgaacacaaagaagaaaacaacaggcactggggtctatttgattggggaagagaagggagaggagcagaaaagatagctattgggtactaggtttaatacctgggtgatgaaataatctgtacaacaaaccccaatgacacaaatttacctatataataaatattcacatgtacccctaaatataaaataaaagtttaaaaaatattaagatgtttattttgtattactaagatatttgttctgrgtacaagttctttgtcagatatatgttttgcaaatacttttttctatctgttacaggcttatttctcattaaggctgtgtcataagtgggggaggaaataccccttgtggggtctttaaggttcactccagtatggtcacggaaattatatctggagaggcataagaaattaaaggatttattatactcataggtcctagagaaggagacaccacatgctcagagggccatgcaaagtcacccaaaagccaaacgtttgtggcaggcagggaggaaacagaataaggacctctaggcaagtggctttactgagggtcatgggtgaagtagctgtggcatgcaggaagccttcttatgggtaatttgaatgtaactgagttactatggaaaggaaagaaggggtaaaayggtgaagtcatcatgagacttattgcttgaaaatatacatgttagggatgagtacccagagatgggcaatgactaggtaaaagttcaaaacaagtgggggtgggtgctggcattcaggcaaccatggagcaacaaatagctttacattgcaaaggccttttaatgaggagaagatttttcattttgatgaaatataatttattcatttttcaattaatggttaatscctattgtgttctgcctcagatattattgcctaccttaagaccaaaaagatctttttgtacattttttgtatactttttatagttttagttatcctggttcattgaaaatgatatgatatgaagtagaggttaaagtttgcttattttttcctatatgaatatctagttgcagcagcaccatttgttggaaagagcttattttccccattgtattgctttggtacctttgcatacacacagacacacacacacacacacacacacacacacatacagacacacacacagatatgagtatgtaagcatggatctatttctgggctcttaattctgttccattgatctatttgcttatattaatgtgaatacctcactattttgattactgaagctttacggtaagtttttaagttatccaactttgttctttagattgttctggccattttagattatttgaattattatataaactttagaatccatttgtttctgttaaaaatacaaggcttctgagactttgataagaattacattgaatttttagatctatttaaagataaaagactttttattaatactgagccttccaaaccctaagcatggtatatcattccatttatttggactttcttgaatttctctcagcaatattttaattgtgtcagcagagcattcttgcacaccacccattaaatttaaccctaaaagttttatgatttgaatattttgaatgacatttttgtttttatttttcaaatgtttattgccggtatatagaatccgaatttttttctagattggattgtattctgcagtattagtgaattcactttagtttcacaggaatttttcttctgcggatttcttagaactgtatgtgttcacaatcacagtgtctataaacaacaatggctttacctctttacaatctctatgccatttatttttattactttactgaactatctaggacctctagtaaaatattaaatgaaatgctgtcaatatacatctgtgtctttttctagatctcagaagaaaagtgttgaatattttataatcatttatgtcattagctataagtttttagcagatacattgtattagtttgaagacttccccccatttctagtttgctaagaatttttccatgattgactgtttagtttttaaaaatagattttttgagccaatctaaatgattatatgctttttttctttaatattttaatggagtaaatcccattaatttaattttgtatatttagccaagcttgaattcctgtactaaattcatttagtcattatatagaacctttttttaaaaaaatgtgttattgggttttgtttactaatattttgttaagaatttttgtgtctgggttcatgagaggtattggtcaggattttgaggggtttttttcccctttgtctggatttggtatcaaagatatgctattttcataaaataaaatgcgaagatttccatctctattctctgaaaaagaatatgctaaatggatattgtacagctcttaaatatttgatagtattcaccagtgaagccatttgtgcytaagaawtatttaattaaaattaagtttctaaaatgtatacagggttggtcacactttccatttcctgttctattagttttgctaagttttgtttcatggaatctgcccrtttaatctatattgtaaaactaattagcataaaattatataatatttctttatcatctttataatgtctgtagaaaggtcccttcttttgcttctgatactgctgattcttgttttaccttttyatcgtgatgagttttattaatcaattttactaatcttttcttcaaattttgatcttgttgatttccttttttttgtctttttttcactctcatttttaacattccctttcatttactttcaatttaatttgttttttattttatcttcttaagatgaaatcttagaccattgcttttatagcttttattttcctttctaatgtagacatgtaacactataaatttcccccagacgaactgctttaactgcattctacaaattttaatacatagtgtttgtattttccttatgttcagtaatttttaaaaatttccattgggcttccttgtctgacacataagtattttagaactgtgttgtttaatttctaaatatgtgcgtattttcttaaaataatgattaacttttaatgtatgacagtttggccagagaatgcaatctatgtgattattgatagtctgaaataaactagtagatgatctatcttgaaaagaatatgtatcctgcagttcttatgtgtaatgttttaattaggtcaagatgatttataatgttattcaaaactgctatatcttacagacttttgttcatttcttccaacaattactgaaagactggtgttactgtttttaactacgattgtgaacaaatctaattctccctttagtttagaaactttgagagtttgagagattttctgtgaaatgaatgcacatttaagatttatgtcttcttgatgagttgtcactttcaacattataaaatatgcatcattatctatgataatgcattacttggtgaagtctaatttgtaaggtatctatataactatattggcttctacatgattaacatcttcatgatgttttctccatccctttccttttgacctgtgtctttgtgtttaaagaatattccttataaacagcatatagttgactcttgctttttttttttttttttttccgagacagagtctaactctgtcacccaggctggagtgcagcggcgcgacctcagctcactgcaacctccgcctcctcggttctaacgatctagcgattttagtgccttagcctcctcagtagctgggactatgggcataccccaccacacccagctaatttttgtatttatttatttattcattcatttgtttttgagacagtctcacaatgtcgcccaggctggagtgcagtgaggcgatctcgcctcatcacaacctctgcctccgggttcagacgattctcctgcctcagcctctcgagtagctggaattacaggcattcgccaccatgcctgtctacgttattgtatttttagtagagacggggtttcaccatgttagccaggctggtcttgaactcctggcctcaggtgattygcctgccttggtctcccaaagtgctgggattacaggcgtgagtcacttcgcccagccagactcttgctttttaaatataatctgacagtctttgccttttaagtgggccatttagtctgttgacacttaatgtaattatttacaatttagattaagcacactatgattttattttctacttttctatattttctctttgttatttcatttttgctttctatttgttctgtttgctctgttacttcaacttctccttttctacctcctttttggtgaactgaataatctttagtattctatttcctctcctttattgacatttttgccatgcctttttaggttactatttattaatctagagattataatgtgcatgtttaacttactgcagtctctcttcaaaatattaactctccaagaaacacaagttttatttacctatacattttaccatttcttgtgcaattcattctttcaactagatatgtgttccatcgtcctttaacataaaaatattatgacatttcttgcctttaaaattctcctcattttagttttttactgaaatgtctttattttacctttatatttgaaagatattttgttgggtatagaagtctgggctgaacaagagtttttttcagccctatcatgtccccttttcttcttacttgccttgtttctgataagtcagcaacaactcttatcatttttctcttgtatgtaatgtaccttttctgacagcttttaaaattttattttcggtaaaatagtaaaataagttttcagcagctggatcattaattcttcaaataatatttttgccaaatttttctctctcttctccttctagcatttcaattatacattagactatttggactatttgacattgtctcacagatcattgaagctcttttctttctttttttttgttacagttttttgttttgttttagtttgtatgactccttttattcttgtctgcgagtttactaatattactttggcattgtccatctactgataaggctatacaattccttttgtttttttttttttttttwaatgagatggagtctcactctgttgccaggctggagtgcagtgacgtgatctcggctcactgcaacctccacctcccgggttcaagcgattctcctccctcmgcctcccaagtagctgggattacaggctcccaccaccatgcccagttaatttttgtatttttagtagagacggagtttcaccatgttggccaggatggtctcgatctcctgacctcgtgatctgcctgcctctacctcccaaagtgctgggattacaggcgtgagccaccgcgcccagcctataatttctttaaaaatttatcttgtagttttcagttgtagaatttctattcttttttgtagtttttctttaatgagattatataatctcatcaaggaaataagtatatgcttactttatctttttgaagagaaaaattgaacatatttatgatagctacttttataatctttatctgctaattacagcatcagtcttatccacatctgttgacattatacttcccaattatgtgtcatattttcctgcttcacattctagtagttattttattttctgatgtacattgtggtcacttcatatttagagctgaaatattattgtctttctttaaaaagcattgtctctttctaacagaggatagttaattttctggagaatcagatttatgctgtggagacttggatttggctttgttagaatgggtctaaagactactttaaggctcgtgtatccctattctttatttgcaatttttatgaaatttcagctgaatgcttgaggcattaggaaagtctctccactctgaatgtcagaactacagtatttccccatattatgcaggcttcagaaactctattcagctcacaattccccagaagttattctctgctagacctcacaaagtctagccttgcttatgtacactgtaatactcactacagtckaggagactcgtaggcagatttctggagctccttatctgcagagcgtcctcctgtcctcttccctgctgaaagattcctgcccctcacaatctctgtagtccartgtgtttccttcatccagctgagaatgctcctccttgcatgggctccactccatatgtcaagactcgaaatgtgccctctggcaacaattcaggatcagtatggatctcacttggtgtgtttttctttcacagatcacagccttgtgttctctcttatccatgtctgaaaatattaacttctagtcatatagttgtttatggcaggaagtttgatctggtattcattactctgttatatcaggaactgaaattggtgatgctaattagtatttaatactaaattagattgagaccctgtagaatgctgcctcatcaattggctagtactctgcagacccattttccagcatttcctaatcaatttgaccacatcagcctgaagtgatatgagtgaaattctgtccttgtgattcccaatagccatgcttgcatttttcctcatttttatataggtagcatttggatggtctcttgataagctggccttcatgttttgacacattcttttagtactgcttactaagtttttggttttagatttctgttttttttttctttattacttctctcctttacttactaatttaatcttttctattgtcttcagaggtgaaaagattagcacactatgctagatatttcactttttgttttaagacatggttttcagaaatgtgtgatattttcaaacaagggcctctttttgatcacccagtacattgtgctattacagtatattagatttatatgttcttgaatccacttcctttaatggatggacctcctctaagaccaggagtcttacgaatctctatatcaatggttttacccacctctatatcagttcttattaatctmtgtatctataacagtaatgaaggtcacaactgttgttttcagataacttagatgttcagaaaagtgcattgtacaaaacttagtttagaataccatcgataatcttgagtattaactttagatatggaatctaaaaataaagattgaggactcatgaatattagtgaggataaaaagtaaaatgacaaattatgaccatggcatggtttttcagctggtctccaaaaaattttcagtgttcagtctgaacctttccatgaccagaaaaaagaaagaactgagtaatctcacatttcttctgtaatcttgttctttttttgattccccaaatggcatgcttcccttatataactcacatatcacattttctaaaatttctggttctattttgttatataattacatatgcccatatctttttcttcctccgaggctgcaagatatttgaaattaaaaaaattgtgcttattttttaatcccactctagtgtgatcaaatgactactctgataaatcaatagaaactaaataaatgttggttggtagaatacaggaataattattataaattgggaagaaatcaattaaattttcaattttaacttttataatttctaagaaaaatatttaaaattattttaaatatacgttatactagcttaggctaataaaatagatctctagcatctttattttatgtataagtaagaatagctttttattaacacaggacactataaaacacaagttctttttaaaatggtagaaatggaaagctcaaaaatgcattaatatttttaaacatttccaatatcttgttaaaattctggtttgcctactaataaaaaatcagtaaataagattctttcactcctacattaatgttatctgaaatagcacaagtcctgattaagcaagtaataattttctatagtggttgctctctagctagatcatccccaaataatgttaactaagctttatccttcaacaagaaaagcctagactttctgaagatttcctttataatacaggatccatgtctcatacacagatgtagttttgatttatcatgcccaaggacagacttaaacaaaatctcactaagtattttgtgcttcttatgaaagaaatttctgggtagaagttccatatgatttttctgctcttaatcctatgaagatagtaagcataatgttgccctttacagataagaaactgtaagctcggaggtgcctgtaaaaatgagcatgttttattctaggttcatttctaggcactcctcatggaaatatggagtggtttgagactttccaaaaatgttggtctgaaattaatgaacagctgtagatctttagcttatggaaatattccattcaagtcaaaagtctgatctggaatttctttcatartgtattttgaaatccatatttagatcatacccactaatgaatgaacaccaattaccaaatagtacctacccaawtatggaatggtcagggcaatatttcccatgcaaatccattgtgtagtcaagtaaattttcatcactgcttgtccactttctctactgcttctctttccagtctcaaaaccacttattattgccgattcttcttggttcctctgtgtaggtattttacctgacaatataaatgtgactttatttttaaaaggaaatagtaagaaagcaaatgaaacttctctktgatttgtgataagcagaataaacaaaacacaatattttcaggatagaagaataaagaatctgtgaagaatagctttagtaacttggaaagactgatgaattagatcacaaaaggattaatgcatatcatgcttatctcatgcgagttaatggttcaaataattctgaataagccaaatagtcattttagcattggattagcaacacatctatgctctgctataaaaaaattatgcagggtaataacagaatcgcttttcctctctgaaagctatatagaataaaatttaaaatacgctgcagtagtagcttttaattccgatttttagactttccattctctttttattcctcatgtgtaagaggaacaaaaaataataaaactaaaatattccttttactttgtggaggactttttttttctttcctgaaggaaatgcctttttggataattccttttgtttttcatatatatttttaatccacactctcataaaattaaattgaagaataagactttctagatgtcataaaaggatatttgagaagattgtgctttartaggatttaaatgaagtaaagacttagcttgggtagctcagaattggacaagttttgcccagccttgcatagtatctttttaattaaagaggctatgaaaattctatttggagtaaaaatctacattggcctgaggtgtgcgttccatctttcccctttccactccttgagctagctattctttgagcttatattactctacaaacagctcactcagtaactccatacgccttggtcatttcactgcagttagagcatccaattcccactgtcagacagctgtgaagagaagcaaagagcatttaaggggcagaaagggtagtttctcagagcataatttttattttattttttttccgtttctttgttagtactgtttgcctctgcctggagtggacttttctgcttatttcctactcataagatccccacaaaagtttcttatggtttatttcttttataaaatttttgatctaatctccattgcttaacacaatccctcgcacacagggggtactcaataaatatccatctgtgtggaaatatgaatatgtagctgagttgaaataagaactgggctgtttcttacggttccaatctattcttctattcaacatagcagattagggaagacgttctagaggggacactgttctcctctaagactgtcagtcggtttgctagaaataaggtgaaaaaaggcatcacatttgaaaaactattaagggaaaataagaaaactatcagtgtggtgtagtagtaatagaaagggcatagccatctggactcagacgcacagtgaaattacagctctgtccacttaccagatacgtgaacttgggcaagtgtttaacctagatgagtgtgttttctcgtctgtaaaataggaaccattattttacctggaatgtggtggcatatgtaaagcatctagcaaagtgtctgtcacagagaagatggtaaataatttgtaataaccatattactgttgttaattagttcatcgtggtgggagtgttgagtggagaactaggcaggagatgaagctcaaaaagcatgcttatttaggttttgaagacattttacatgatatttggaacagattgctgcrctttatccaaatatatgtgggcttttgttttctttcttatcaaagctcggtggagagaaaaaaatccatgctttgatgattctttaagacctgagcaatgtctattagacgaaggcagcttagaaaaaagatattcaatgtagttcaagttaaaaacaaaagaaaactaatatttaatrcggttaaaaatgagattgtgttcaccttataggtttgttttcaaggtaaatatttaaactgagtaaatcattttttcctaaaactacttggtgagtatcatcatgcccttcattgccacataaatacaaatttgagtttaaaatcttagattacaatgtagaagctaatcaaagcagttcactgtttttattttttatttatgtacaataaaattcactcttttgtggtgtatagttctgagtcacataaccactaccagaatcaggatacagaacagttcactcacccctcaagatcccctagtattacccctctgtggtcaatattaatccccatttcctaacctttggccactacctgtctgtctctatagtgtctgtttctttagaaagtcgtataaatggaaatatacaatagtcaacctttgaatctgttttgtttttgttttgtttttgctcagtgcaatgtatttgagattcattcatggtgttacatgtatcagcaattgattcctttttattactgagtagtatttcatctataacatggaatacttctcagcaacaaaaccactgtttctttatccactcaccagttgaaggacatttagggtatttctagtttggggtgataatgaagaatgctgctataaatatctgcatacaggttttgatttaacatagtgttcatttctgtagggtactgctgtgctgtggcctaggtgggttataaagatgtatgtttaactttataacaaattatcaaactgtttactagagttgctgtactatcttatgttccctccagcaatgttagagtttctcttgctccgtatcctcaccacacttgggatgtctctgactttcctctctgttctcaactggagacaacactaggcttttaaatggatcatgtgattagattacttatacctcaataatctcccttttcaatatagggtaacacacaggaatgatatctcatcatacccacagttccaggcattaagctggaaaatattgggaggccatttttcgtattctatctccttattttctttttttttataatttcaacttttattttagattcagggatacatgtacagtttcattacatgggtatacttcgtgatgctgatgttcagaatgtaaatgattctgtcaccaaggtaggacctgacagtttttcaactctttgtccccttctctcactttcccctgtagtagtcccccatttctattgttcccatctttatgtcaataaatacccaatgtttaggccccacttataagtgagactatgcagtatttagattgctgtttctgaattaatttgctcaggataatggcctccaggtgcatctatgttactgcagaggacatgatatcagtcatttttatagctgcatagtattccatagtatagatgtaccacattttctttatccagtccaccattgagggacacttaggttgatttcacgtctttgctgttgtgaatagtgctacaatgaacatacaagtgcatgtgtctttttggtagaattatttatattcatatatatatatatatatatatctccagtaatggaattgttgactgaattgtagttctaagattcttcaagaagtttccaaactgctttcacagtggctaaacaaatttacatttctatcaacagtgtataaatgttctcttttctctgtagcttcaccagtatctattgttttttggctttttaayagtagccattctgacacatcagatggtatctctgtggttttgatttgaatttctctgatgattagtgacgctgagaattttttcatatgtttgttgtcttcttttgagaagtggctgttcatgtcttttgcctgctttttaatggggttggttttggcttgttgagttgtttaagtttcttagagattctagatattagaccttcgtcagatgtgtagtttctgaatattttctcccattctgtaggtgtggtctgttgatagtttctttcgctgtacagaagctcttttatttaattaggtcctgcttgccaatttttgtttttgttgcagttgcttttaaggacttattcataaattctgtcccaaggcagaatttatttctgtccagaatggtatttcctaggtttccttctgggattcttataggtggaggtcttacttttaaatctttaattcattctgaattaaggttcatatatggtgaaaggtaggggtccagcttcattcttctgcatacagctaaccagctatcccaggactatttattgaatagggagtcctttcccattgcttatttttcttgactttattgaaaattagatgttcataggtgtgtggcttatatctgggtctctattctattctattgatcaatatgtctgtttttgtaccagtaccatgctgttttggttactgtaggcttgtagtatagcttgaagtcaggtaatgtgatacctctggctgctgctttttgcatagaattgctttggctacttgggctctttttgagtttcatataaattttagaattgttttttctggttctgtgaaaaataacattggtagtataataggaataaaattgaatctgtagattgcactgggcagcatggccattttaaaaatattgatcyttccaatttgtgagtatggaatgttcttccgtctgtgtcatctgtgatttcattgagcagtgttttgaagttctygttgtagagatctctcacctccttggttagatatatttttaggtgttttttgtatggctattgcaaattagattacattcttgatttggctctcagcttgaatgttactggtctatagaaatggtactgatttttgtatgttgactttataacatgaaactttactgaagttgtttgtcagttccaggagccttttgacagagtctttagggttttataggtatagaatcattatcagcagtgtggacaaagagttttacttcctttcttcctatttggatgctttttatttttttctcttgcctgattgttctggctaggacttttagtactatgttaaataggagtggtgagaatgggcatccttgttttatcccagttctaagaaacattttcaaatgctttcagcttttgcctgtttggtattatgttggctgtgggtttgtgatagatggctctaattattttggagtatgttcctttgatgcttagtctcttgagggcttttattatgaagagatgctgaattttataaaaggctttttatgcatctattgagataattgtatgatttttgggtttaattatgtttatgtggtgaattacatgtattgatttgtgtatgttgaaccaaccttgcatctcagaaatgaagcctacttgatcatggtgaattaactttttgatgtgctgctggattcgatttgctagtattttgttaaggatttttgtgtctatggcctgcaggttttttttaattgtctttaccaggttttagtattaggctgatgctggtttcatagaatgagtcagggaagagtccttcctccttgatttcttgaaatagtttcagtaaaattgatactagcttttctttgtcgggtagaatttagctgtgaatctctctggtttggggcttttttatgtgactgattcaatttcagaactcattattgatttgttcagggtttcaatttcttcctgattcartcatgggaggttgttcatttccaggaatttatccatttcctctaggttttctagtttgcakgcaaagaggtgttcattatactctctgaggatctttttcatttccatggtattggttataatgtcacttttgttgtttctgattgtgcttatctggacctcttctgtttattttttaatctaagtagtggtctattgaaattgtttatcctttcaaacaatgaaccttttgttgaccctttgtatggatttgggggggtctcaatttctttcagttctggtcttgttttagttatttctcttctattgctagctttggggtcagtttgttcttgtttttcaggtttctctaggtacaatgatagatcactaatttgagatctaagtttttgaggtagggatttagtgctttaaactttccttttagcactgtttttgctgcatcacagagactttggtatatggagtcttttatttcaaagaktttttttttgacttyggcattaaatttgttttttacccaaaagacattcagaagcaagttgttatatttccatgtaattgtgctgttgggggcaggggattttcttggtgtggatttctatttttattccattgtggtctgagagtatggttggtgtaatttcaatttttttttaaattattgagacttgctttatggccaagaatgtggtcaatcttgttgtatgttccatgtgcagttgagaagaatgtatattctgtggtttctgtgtggagtgttatatagatgtccattaggtccaactggtcaaaatgtctaagttcagaatttcttttagttttctgcgttgatgatccatctaatgctgtcattggggtactgaagtccctgatgattattgtgtggctgtgtaagttttttctacagttctagaagttgttttatgtatctgtgtgctccaatgttggatgcatatatatttaggatagtaaaggcttcttgttgaattgaacmttttttcattatttgatgcccctctttttcctttttttaatgttggtggtttaaagtctgttttacgcaatttaagaatactgaccactgctcttttttgttttctatttgtgttatagaaccttctccagccctttactttaacctatgagtgtgtttatgtttgagatgggtctcttgaagaccacagatggatgagtcttgttttttatccaactagcaactctatgccttttaagtggggtgtttagactatttacattgaaggttaatattgatatgcaagatttttatcctattgtgaagttgtttgctggttgctttatagtttctattgtttggttgctttatagggcctgtgagatatgcacttaggtgtatttttatggtagcaggtgtcattaatttgtctccatgtttataattcccttaagggtctcttgtaagcckgttctaatagtaacaaattccttcagcacttgtttgtctttaaaatattttatttctccttcacttagaaagcttaatttcacaagttgtgaattcttggttggaatttcttttctttaaaagtgctaaaaatagaccccagcctctcctgacttgtcaggtttgtgctgagaagtccactgttagccttaggtggttccttttgtacatgatctgatctttttctctagctacctctgagatttttttcttagtgttgatcttggacagtctggtgggtaactgctttggtgatgttcattttgcatgggatactgcaagtgttctctggatttcttgtatctagatgtctacctctctagcaagattagggacgttttcttgaattagcccctcaaatatgtttccaaggttgcttatgttttctccttctctctcaggaatgccaataatttgttggtttgttcactttacacaatctcatatttctcaaagactttgttcatttttctaaattttttttcttaatttttgtctgactgggttagttcaaaagactagtcttcaagctttgaaattatttcttctttctagtccagtctattgttaaagctttcaattatattttgcaattccttgagtttttcaattctagaagctctgattgatttctttttaagatgtttgtctctttcttcatttcattgatttatttaggagtttatttgtgttgacttttaaccttgttttagatatcattgagcttcctctcaatacatgctttggattctttgtcatttctgaatttccattctggttggagaccattgctggagaactactgtgatcctttggtggcatcactacattcagatttttcatggtgccagaatttttgcaccatttttttctcatccagagataataggacttctaatttttataattatttaactgtgtgtaggatttttcccttttttctttatttccctataatatcattagcgggttttttctttccctttctctttccccccactccctgtggggtgtgaccatagagaatgttgaatatggttttttgttttgcttctatagccatatgcacttcctcttggtaaatttatattgagttctgtggtttgacttacaagccagtagatggtacttatgggtaagagctggttgtggccaacatgcctgggtatatattttattcttgtttaccagtagaagctctagcttctacctctagcaatgggctcatccatggagcccacagttgtctgagctgtctcctcagtcctgaggggtttggrgacccagatgggtgaggtcagaccgggcaggcccatgtacaggtcccccagtgtcagccacatgcatcagcaccaaggaagaaatgagtgaagggccaccaagcccccaaaggtgtgactgggcaaggggctgggaaaccttttttgcctgaagttctctgcacaagtggcaaggtcagcctaaactcctgattcaggaaagtgtgtgctccagatgcctggttatctgcctcatcatagagtgtagagggccccactgcaccacaatttctgcacagaaagggtggggcagttcaggcttataatccatgcaaatrtgttgtgctctgactgcctggagatatgcctgggcattgggcagagagggccctgcttcaccacagtctctgcacaggaggagttgggtggctcagtctgctgatcgaggtgacttggtgctttgactgcctggagatctgcttgggcatgaagtggagagggcctggatgcaccatgatttctgtgcaggaaaggtgaggcagctcaggctgtcaatccgggtgagccggtgctttgaatgcccggagatctgcttgggcacggagcagagagggcatcgctgcaccagaatctacgcacagtaagggttgagtgcctcagactgctgatccaggtgaccactacctcccatttcttgtcagttttggtagtttttatctttcaataaaatgattcatttaatctgagttgtcaaatgtgggggaatagagttgtctataattttctcttaatatcattttaatgcctgtgaggtctgtagtattatgtcttctttcatgtctaatagtaatttgctacttctctctttggtcagtcttcttagaagtttatcaaattttattgaccttttcaacaaaccaccttttgatttcattgactctatctgttgttttctattttaaatttcatttattttttttcttttgcctttgacatttctctttttctttgcttggttttggcttaatttggtttttgttttctaatattttaatatggaaacctaggttattgatttgaatttttcacttataattcagtatttagtgctgtaacttttcagtatttaatgtacaacttttttctctaaagctttaaatgcattacagaaattttaatatgaggtgtatcagtcagtttccacaaaagaaactckgtgtgtgtgtgtgtgtgtgtgtgtgtgtgtgtgtgtgtgtttgtgtgtacatacagagagagagtaggggcaggaaattggctaatgcaatcgtgggttctggctagacaagttcaacattcatagggcaagccattagaaactggaactcttgggcataagttggagctgaagctgcaatctatagttagaatgtcttcttctgcttcagggaagcctcagttctgctcttaacgcctttcaactcagaatcttcttgcttaaagcaaaataattatacagtaatcatgtctacaaaatacctcacagsaatacctagactcatgtttgattaaataacaaggactacctcttagccaagttgaaaatacagaactgaccatcacttgtggtattttcattttcacttagttcagaatatrttctaatgtttcttttgacttcctctctcatattttgattatttgaaagtgagttatttaattttccaatatttagaggtttttaaatatctgtttttgatttctagtttaattttgctatgatcagatggtctttatttcacttttttctgaagaatgtttttggttaatatagaatttagaattaatggttcactgtcaatacttcaaatagattataatactgctttctggcttctatgattttcactaaaatacgttgtcatttgaattatttttttctatatgtaaagtgtttgttttacttgttgttttcaatattttttctttatctttggattttagtgttttaagtatgagaatttgcatgaaattttttttttggtggtggggggtgtttctcagcctcccaaatctgtaaatttatggctttccacagatttgagaagtttttagctatttttttctgcaccaatctcttacctgccccctctgggattctagtaacacaaatgtaagacatgtcccacaggtccctgaggctctgctcatatttttttatttgtgttttctctcttatttataaaggattatttctgttgatctacttttcaaattcaatgactcttcttttttttctggcatctccattctgctattgcattcatccagtttattttttagttattttttatttttaaaatatttacttcgtgtttatattttctattttttacaacatttctttccatccattttaaaagaatttttttcttttcatagaggatagttacaataactcctttaaaatctttgtccaataatttcaacatcatgggtcaccttggggattgatgtcagttgattgacttttgagatgctcttttttatttttagtaatttgggattgccttatggtcatttgagtattatatattagactctggtcctgttaaaatcctctagagaagatttttcttttcttttctttccttttttttttttttttttcatcttagcaggtaatcagtctcccatggttcttgtcataagtctaacctcaacctgctctatttaractctggcttctgtgttagtttagttttcaattcctttgtaragctagtttgtctgctccacacacacataccaaccacccaggggtcaacctgagctttgttctatatcatagtttaattatcaaagcagttgttacgctgccttggttaatttcaatgcatgcgccaattagtggtgagcctgagacttcatacacaaaattaggtgtactttttctctaccactttctcctccatgatttctcttcactctctagtccccaggggcttatttctctggtcttctgtcataaatggcagggctttaggttccctatgctatttcacacttsccatgaygacttgcttcccttgagggcaaaacaaccagagagagactggaaagagaaaattaatgacgattcacacacacacacacacacacacacacacacacasacgagagagagcgagagagcgagagagagaacaataggaacctagttttccagtttctctgctcaaaaaaaaaaaaaaaaagaatgtcttccagagtttgaggtgtatgcatagctgctgctttcactagtctaaggctttgtgactggggcttttctagaatacagacaggtacatatgtttcccttgaagcatttcctgtctctgcttgatgtgcagttctgggatttgggctgtcctagagtccaagctggaggattaagaagaaaactgaaaatacctttaagcttaataccatattgatactactttccatttcatttcattccccaattcacctgtcattatttacttttctgaattttcagatagactccttatatttatttatttgtaatcaatggaaaatggaggatggtatatgcttaatcacagccagagctggaaccaaaccaaattacatatttttcttctattggtattctcatgttttcttctcgttttgtttttgcttatctgtttgttttgtttgctttgtttttacatcatgaatattttagcctgatatgtttgagttttaaaataattttccttarcctgccttgctaaggtatatttctcttttcctgtaaattatctagagaaaagagcccagatattacttaaggaaaagccattcacaactgtttcaaaaatataatgaaccgcaatattgaggaaaaaataatacacttttatattccctgtctagtgtttttcttcttgcctttaagtttcccttcctaggcacaattatgagctatttatttactttaataaaagcaaacatttcaccctgtgctatctaggaaaggtaatgaatccagtagcaaatggcctgctttgaacataatttctaaatgagattcatgtggaatagcctcacttacccactcaaacatacacaatttgcttgcttgcccagggaattgaacctaagatctcttggtagagccaagggaattaatgccaattatcaaaaaaaaaaaaaaaactcagttattttcagtagaatcatacttacatggaatttgaggcaattctactaccactatctgttgactactctaattcctaatgctacgtgtttttttctttgcagctacayacgtcatttaatgaacttcacattgaacacttactatatgttagcactgtgccacagattgaaggcacgacaaagatgaattagatgagtccctgccttctaagagtaaaggacacagaggcatgcacaatttacgagactatttgtcagactgtgctgagtgctgtattttacagaggcagaaacagccttctctgggaatatacacaagggagggatgattcacccctctcggggggagtgagaaaggtttcctagaaagacaatgcttaaaattagctttaaggttgcattacacagtggataagtacagaatacagggaatgtcattcaaagcaggagtatctgcaaaggcttggaggcttgcaaatgcatggcactctaggagagcagaaaatagttgaatatagctggtgtgtggcacactccattttgtttttattctcttgaactaagttgtattatttttcttacttcatggtttgggcagtgatggaattggccaaactatgaaaaccaggacttggactccaagtagatgtgctattgcaggtgctccttggaggcagtgatagatggttacaacttggccttcacttgcatccaccctctatgtggaacatgcttcctatgtgactctccagaactactcaatctcctgccttccttagtgaaccataccatcactctctctttacaaaaaaaaaaaaagttttcatatattcagggagtagcaagtaacttcttaagagcagacatcatcttattcaccccaatgttctaccaccatgcctatgaaattagatactctcataataaacagaaggaaaaaaagtgataaatgtaaatgtttcagtagaaccagtgggaagtgagatggtacaaggcctgccttgaacaccttggaataacgtttcttactttcctttcaatttgtataaaatcgttamgaaataaatccaagttctactttaattaactcgcaaaatacttgagctcatctattaccctctattcctgtagaatatttataggcatattttaaaactgaggaaaaacaatcatattttttgtaaaagagtttattatttcaacagaaaataaaagcaatctgggccagtactgaatacagaaaactaggatataaagaggtaagactccaggtgccatttggacttaattctrccattctgtataatagcatgaacagcatctcctacctccattcttgagactgggaagagcttggcagacgctaaagggcccctgtagcatgtgtagttcccttaaaaatgctgactgatttccctctgctttgggtgtgggtmaaaaaaaaagcctctgcttttttgtaggtctaaagaataaaaagttttttgctgaaccaaaaggaacaggaagcctctcaccactgccaaatgtatcattttgatttccccataatttcttttctaccctaagggcttaaatgatgtttaaggatgggtaagattcatagttaatggatcaatccagatccacttcctgtttttgctaatacaagcagtgctgcaatgtgcactgttgtatgtttctcttactctacattaaaaaacaaatgagaagctaaaatttctatctgttgaagacaattatttttgtgtatccacacaataaaatactatatagaacattcaataagtgaactacatctgcaaaaatcacaaatgtattgttgagtgaaaatcaaaatatgtacagctgatctatatatagaatgaggtcatatgtgtacaacaacatacaaggcaatcaaatataacttctgggatacatacatgtgtagtgaatatataaaagcaggccaattaaccataaatgccaaatcaggagagtgcttaattctgagtaggaagaattagaatcaagtctccttagaatcaaggagacttacatggagaaccaagtattgttttatatctttaaaaaaaatctgaatcaaatggcagaatgttgagatttgataaagatggaaaatgagtatacatgtgtttttaatatcattctttatgcttttctataaaatatttcttctaaaaattattaggtggggaactgtctatactatctctgcaacatttttggaaatctaaaattagtccagattttttgttattttaagttctgggacacatgtgcagaatgtgcaggtttgttacataggtatacaygtgccatggtggtttgctgcatccgtcaatccgtcatctaggttttaagccccgcatgcattaggtatttgtcctaatgctctccctcccctttccccctaccccctgataggccccggtgtgtgaggttcccctccctctgtccatgtgttctcattgttcaactcccacttataagtgagaaccaaaaagttatcagatctgttattggtttacaaatggctttgtctttaggtctaatcaaaagaaccagagcttagagtagaaggctttgagaccagagaaaaagcttaggtgggggagtgattcattttggctggaaggtttctcagaaacaggagcctctgatctgagtcttgattcttagggagaatattgattgatgaaagaaaggggaaaaaagtaaaagcatgcccaagagagtgggcagccagtggcatgtttgaggagtggcaagttgccacggtggccaaagcatgagttacctggagaagtggagcagaaaatgaagctggagtggaagctgaatttccaaaaagcacctggcttgctatgctaaggaatgcggactttacaatgtggaaataaccaaggtttctatgggtggtgacaaagtccaacctgtttagcattctgaaggatggtagagatgagttgaggccatcaggaaacctctcagaggtaatgaggctctgagataaaaaaaggtgaccacttcgagatgcagaaagatgaaggagcagtaggaaaccagtttttctcttcttttttgcctcttgctttcttctttctctttttcactctattcctttcagtacttctcccaaagttttcagttcctttatgaaggccatcaaatactccacccaagagccgggctatttttaaaaatgagatgcagtgtattctgtgggaaggtcaccagtaatagagcctcaaacttcctatctcttttgtgaatcttgacagcctgaaaagaagcatacattatctgttacacagactccctggaaggaactgatgttctttcctctggagctgtaatggggtctctatagaaagaagcctcatccctcgacacgcaacctcttttcatttccttacagaggagctgctttgtgcctgcaaagggcaccagggcttccaatttaataattctgaatatcactgttgcacagtattgtactcatttgcagtctctcctgtgcatctttgatgacctttcttggcttcagagaaagcagaataaaagcaatctgatcaggactttattccagctggtcactctctgattaaaccagtgccagattttacaagcatcagaacactggtttgggagtgaggatatctggttttttttactagctctaggaygtagtgccttagcttttttatttataaaccagagagcattatttagaaatcctctaagcccattcaaatcctaagcttatgtgactcygtgactccctagagtctaaagatgaactgtcttcatttgttcatattttatgaccatctgctgagtgcaaagaagtggatgcctcaagtgcttggaaatgcttagagagagatggttggcttgtgctaaatttgcatttcaagggaggcataaaaatggaagtaaatgaacttttttaatgtttagtttaattttcctcaaaacaataaaaatttaggagagggagcattggaatttgaatctgaaattataatagcatacaagctttgtcaaactggcttgtaacactttagtttaaaaagtcacttatctttgaacctcagttttcctttctgtcaaattgtaacactttagtttaaaaagtcatttatctttgaacctcagttttcctttctgtcaaatgagaataatgtwtgtctctcagagtttgcagaaaacaaatgataatggacttgaaaatactttatggtggaagctctaatcacaacagagtaatacttatcactattaaaattggttttatttgttggtttaactttcttggagcactgagcaattgccaggtacagtgtctggcactgaagttttgtaattcagttttgaaaccttgctttccctttttatgtttgatatttgtaccctttatatatctaagagcaacaagttaaaaagttataatggaagaaaagatgccatcacaataaccaaaatgatcaaatatttaggaataaaagtaataatatgcaagatttatatgaattaaaatgctattggtatatttatatcaaatatattgtacactataaatatacacagtgctccttttgtgaattaaaaaatgtttaatactgttgagaaacaccaaaagagacttgaactaataaaaagtggctagttcttgagaagactcagatgtcaaatatccctaatctacaaacgtattgcaattcccaataaaatttccagcaggaaatctagacattctgataacaaagttcaaattaaaaaaaaaaaacaaaaatatccagggactattcctatcagatattaaacagatattcaaacaatgtggtagtggagatggaaaagacagagtgtaatggaatacaatttaaagtctggaataaacccaaatacatgtgggaattgagtatataataaagatggtatttaaaatgagttaggaaaaaagtttttcaataaatgtttggatcaaccagatagccatctgtgaaaaataaagctagatccatactcacagcttataccaagataaactcctgatggagcaaatatttcaatgtaaaaacaaactggtactagaacagactgcatcagtctgagtccaatcaggagacaaaccacacagtgatttaaacgaggaaagtttgtataagactttgaatctaggctgcatgcagtgactcacacctataattctaatactttaggagactgaggcaggagtatctcttgaggccaggagttcaagaccagcmtagtccttttttaattctcctattttgaatgacctccacaaagcaagttgctgtagatatgtcacataagtctctggatgggttttcatataggatgagtcactgctgctacttcccctccacaaatgcatgtgagtctcagctttgggaagaatgaaataaaggcagtgtgtgctttggaaagcaccagagcagagccttgtgcctcgtgctctgagtctatgttgctattgctgacaggtaaccctggataagacattttccctttctatttatcactaaaaaacaaaagagctggaccaagtgtttcttagtattttcttaagacctaacattttttatttttaccatttgttgtggttaaattgtgctcccccaaatttattgatcttcttttagttttaatttttttttttgagacagggtccctctctgtcacccaggctggaatgcagtggcatgatactggcttattgcagccttgaacgcttgaactcctgggctcaagtgatcttcccacctcagcctctcaaatagctgagcatgagccagtgtgcagttacatcccctttcccaaatgtacaagttgcagtcctaacccccggtacctcagaatataacctcacttggaaaaagggttgttgcaaatataattattcaagttaaatgagaactctctccagaactgtgagacagtaaagttctgttgtttcaccacccagtgtgtgatacttgttatagcagctttagcaaagtaatacaacattggagagtcataccactgctggcagagggaaatacaaacgccattcaagtgaaagaaaattatatcttactttgcacttacctattcatgcaagctgttctattctggttctaatagaaagtagagttccattttaataattttggcagttaattttctcttcttcccaaagactgtttgaacatcacaatgttttgatttacagctcaagaaactcaaaaccacacgagaaaactcttactcatgccactatatatagccagagatgagcacagcattaaaaattgtagccacatgcacatagaagttattgtgtgtacagaatgtttcctcctggatacaggattcagcagtttctcaccacttaggttctccctcccaaggcaacctcagcaggttccacraggttgtcttgaagatcagattttgttcagtatggtagcaactcttagagtacatctgcagttattgattagtacaaagaaaggaaactcaggcatgtgaaaaataatctggtttttccaatagtaaagtaatgggcatgtttaataggcatagagcaattcataaagaatccatcacccaaatttttgcatggaggacaaaaaggtatttgtatgtgtttgtcatttttttaaaaaatcattttcttttgagttagctctttgctgtaagggatgttgttaccaaagatgattgttaagtctgatttgggcaactaagccctaagagttataagataattaagtaatggagcatcatatgcaaattaagtaactgagccggggaacaggattttgatgatttttctcctgttgcaagtagggacaaagtgagtgagccaaggctttgcttccttgggcagtttttatggtccttattgaaagaaaagaagaaatgttcttaaaacggaaatcaggagggagaaagaaaatctgttaaagacaacttgaaaaggtgaactaataaggtccttctcatgattggctcaatatctgttggagctttcattatgagaatcttggaggaggaacctgagaactttcaggagagtttcctgctacattacatttcatgtgctttgaaaataatcagggatatgtattatgtaggaattaagctaggttagtccaacacttagtaaaacctggtgaagaataatatatatttgttccttaagttggtgatttccaaaatggaatgtgcaagacaatccattgggacctaggaggaaaatattattcatctatgtatttggcaggtacctgggtgcctactaaatgctgtgcactatcctaggagctaagcacatagcagaaaacaacaacaggtgaaaaatctctgcgctcggctattttccattcaaatgggaggaatcagactatcaatataaatatatgctatatttattggtgataagtgctgtatcattcagggtcttgggaagaaacagatggcatgctcaaagtaaatgtctgaggagagtgcacgaaaagctatttatagaaagctaggcagagtttaagagaaactaacaaggaatggtgaagtcgtctagggccttctaatartagggaactatctcctccagggcaagaagcggtggcccaaatgaagaggaagcagtgattggtggtaggagaaggacacccaataggaggtgtgaccttgggagaggaaaacagccatttyccatccatagccctgcaagggtggttgctgatggaataaacgtccaggcatctctcttctcaccctccagttccctgcgagtgcctcctattggccaaacccaaagagaagccataattcaggggagcccagttgaatgtaatccatgcaaatcagcctcccagggcacagaaaaggacagagaaggggaaagcagtgtctgcaaggtaaacagaggaacccagcacaagtgttctagagtaaagaggagacagagggtcagaggtaacacaggaagtcagagaagcccttctgagattgacctttgagcagccctgaagtaggtgagaatatgaaccaagtggctagtggacagagaggcatccagtgcagggatggtgagacagggcatgtttagcaaggctaatgatcagtaagaaggtcagtgtgactacaactgaatgagagggtgctggctgatattcagtgtcttggagggtacccaatactaattgttcctaattgtactaataattagtataacagcatccatatgtaatttatgaataaatrttcacatggtggcattgcacgcaaatttttttccccaacagggatatactatccaaaatttttgcaactactgccttagactgagttgctttaagacattgtagttaagtgatcttgtataatggcaggctgcacaggggccacaaagctctatagtccaatgtccatcttcacagattaagattagcccaaggttcctctatggaacatcacccttaaggctaaccttctgtagttcctgctcaacatttgcttccatacatcatactcccctcctgctttataagactctgagggccaactgtcttaataaggagttctgcgttggcttacacgctaaatgaacattctttggcgtggaatcttggccacagtgagagactaacctccttgcctgtgccttagagcctcacccacacagctctaagtggaaattttgacaaaggaatcaaagtgtagaaatttccaacatatgtgcagatattcaaacactgycattttctgacaggtacttatggcttgattgaaggcagaggcacagagttaaaattaattcatgaatgagtttgaaaatagaagtgtaaatgagaccacaattaaagtttttactaattcttcttcccagctgtagacttttctgtgagttggttttagttatatttagttaaaaagttaaattttagatgcagtagcatgtgtgcctttgaattacacatattatataaatgttttgggtttcaaattgtgacaaagacataaattgcatcttaattgtttgatagttattgcaatcccaactaaatattgggcagaagaaaaatcctgctgccccaattacttatgctaaagatattctcaaagttatttaaataggrataacaaagtattctcatagagatcatagtatccgttatttttaacttcttcataattttatttatttttcttatatatgaaacaaatgcttactaataaaaaatcactgctgttatcactcaatatattatggacatctttctggacagtaataktgatctatcatgttctttttaatagatgcagattaatcatacatttttagcatgtaaatataccttcaaaaatatataatatcagcaatttagcaaacatctgtgtaactctgttacaagtaataagttatgtcaattagggcccagtgaagaaaatagaaaccatgcaattatctcaactgtgataatttcatataaaataattgtttaattggatattagagggctggaaaggcacacacataaaagaccctggtgcaccacaaaaaagkcataataaaaggaaccaactaccacttcagggacggcagaataaggagaagggactgggaaaagaatttagaagctgagcatcggagagcacagaactggagactcatagcagggctttctccacctgctgttgaggactctggagcttggaggaggcccttgcagaactggaacccagtcctctggggagcgttgcagctggttggtgttggtgtgtccaaggggttatgatgagtcttgttctaggaatatgggagggtaaatctgaagagtggaaccaagtgccagggcaatgacccatcgctggaataatgccaaccggaacaggaggcaaacaggaagagctccagccttccagtgtctctctagatttcctatgggcagagcctgcaggaatgagctgacaaagcagaaatatggcttattgagcccctgccccagcaatacaggcggagtgtagaaaagtggattgaaaatggagagaacctcacaggggtggcagtcttgttgctgagtcccagcagtaaaagaaatttcactgtgtctaaacttgagttgagctcagtttccttggcctcctttacttgaagtcctaaaggataattaaccttgacaacaactagcaagttgaagatggatctgtttgttgaatgccaaagcccccaagaatgaatctagatatgtgggtttggtctawccccagctactttttctttttccttgaattttttgagccttgctgatatctctaggataggcatgtttcatattctcctaagaggggaacctcacaactggacatatgttgctccatgttattctatagggctttgcaagcagaagtgtttgatagtgctcagagagactgataaatatcctcacagccacctcctgcatcatctcaggattgtcaaggtgtgctaagtgcaccatggcccctgcacatggtgctacaagaggggcttgaaagaaagagcagaaagttttagtcagaaagaggtagtgacttaatctatgctacaaagtgctgcattgttaaaactttgcatgtgtagtttcaccctagctccaacaggacctctgtctcacattaagaattcagattatagtgtcatattaaagtgaagctaaacatctgtctgtttgctgggagaataatttccctgagtataatgtgcctttacaattgagtagaaatatttgcacagcactaatatagtctgcaaagagaccggcaaggtcacatctacactgacaagaacatatgctgtgtttacaaacctcaggtatgtgaacctttgtcggattttatgaggctctcccattcactgtagccatttgggctgctcctaccggtcttttacagtacacaaataaaggtgactcaaagtctagacaaggtttttggctttttttttttttttttttttttgcacatgaagatgcattccaaaatcaagatgttgcattgtaaaaagtgcctgagggcctctaaagagcaaggkggattctacatacagaaatacttaaataattacattataaaggccaagtagaaaaaggtctgtcatttctgagacaatggaagcattcatcatatttttgtttttactgtttttctctctgcttatcaatattttatttttcaatttagataccctaattgtgctgacagaaatgtgcgaatatatgagagccagagcaagtaaacaagaataagagaaaggtccagctgtgtggtgtggtagcattcactcagaatttatgcccaggataccttaaaaattcactcctcattcattcatcaaacaacgtatatttcattatcatactataagctacaaggattattaaracgcaaaaacatgctttctgctattgttataagacatgttacaaatggcagagacattggataaaacagaattttagaggaagaagaaagtatcacttaatgtaaggagcattgaggaaaatcctcaaaggaagcaatacttgagtccagccttggaaaatgagtaagatttgaatgagtaggcatgccaggtgagggacatggtgtgatggagaaaggaaagcaccaggacacactggaaatgtcagactctcatccagccagaggccaagatgaggagccacagaaaacaggtcccacgggatggattgctgccagacagcaaagggcagtcaaagccagactaaaggaggttcagtgcaccagtggcaatgaggagccattgagtgttcttaatccccagagatactacaagcatctgatcastagattgaagtagttaaactaaatcaagttaattaacatacgtcttacctcacacacttatttttttgtggtgaaaacacttaaaatctgttcttagcactttccaagtagacaatgcattgtttttaactgtaattaccatgttaataaaatagatttctggaacttattccacttaactgaaattttatatcctttgactaacatctccccaattgctcctcttgtcccagccctggtaactaccattctgttctctgcttctgtgagttcaactattttagaatccacgtgtaagtgagataatgcagtatttgttttcggggcctggcttagttaataagccgccccccaggttcatccatgttgtcccaaatgacaagatttcctgtgatctttttaggatggtttggtcatagccctcatctggcctgaatttcttagctagcacaaatttctatcatcattcccacctttcctaagtgtgtttttgtttatatctgatcgtaagtaccaatgagcagttcagactgtgtgactgtgagaggtgtaatcttgcatggggagcaggagagctagactgaaagggagtgagaaatggaaatagcctacctgataagggagtcgaggggaaggaggcttaaaaggcaggtgacaaggtgtggaagaccaatttagcccacctcaacattttgcagaaggctagctctactaagtggttttattctgatactttgatgacagtcccaagaaatgagattactaatccccctgttaagtggtagaactgactgatgtgggaaaagtaggagcaaactcagctgacatcggcttacctggcaccttcagaaggcccacataatgcaagagcctcagccccctgragttttctgtccctaccccagaacgagtccgtgttgatttaatctgaatttagcattagatgacaaaatcgaatgtgtgccatcgttttcggtttttcttcaatgagacaggaaagcctgtggtctcccagcaaggatatttaccccacccttgatggagccccagtctcccggaaagctaatactctgagctccaggacctcagacctcatgacacataaaatgccgtctctaaaacatcaattggcagctgagccctcatttgtttcttcctctgcaatttttcttgagattggaatggattcatcagccaattaggatgaaaaccagccaattaactaaatccctattagcttctcttgtccaagggcagggatgaaaaggaggaattcttgcttgatatagagaagtctcccaggtcttctttctgacaactgctaagtgtgactgccctttctctcctttcctacaaggggagggtgtaccacctgcatgttattcctgggtctacccggatcatcccagttgacccagaaattcggaaagtgggtgcagagaagtagagtctctttatcatttccttgctaatgaaaagagatgtgataagaaaattaatcagtttaacagaatataattctctgtagtgttaaaatctggcccaaataagcagtcttatttttcaaatgttttaactctgaaagtactacctcctcattgtaaatagcttggaatatacatgtatgttaatattcacctgtaatttcactatccagagataacatctatccacattttggttatttttttgtccctccagtgcacattgttttatatatttgagactatatataaaaatttgctgtattgttaaaatttatgttaatgatggcaccaatattctttatgtgagtatacctaatttactaaaccgttcccctattattgttgcacatttagattgttttcagtgtttcattatgataaattatgttcttgttaatgtctttgtgcacaaatcatttttggtttttaaatgcagcttattgtttcttacgtgatgataagttgcagactctcttcccataaggtgagggtagcctgcagaggtaggccattgaggggcagggtctggttgctggcagtgcctgttggaggccacataccggttaaaacttcatggccccatgtctgataaacatattcttaattccagaaacaggatagtcctggtatattcactgatttggaccttaggcctgactggtgatcattaaaatagcacaggatggtgaataagccattatgaccrttcattttaaaatgtgggaattgggaaatcccctttctataacagaactattcatgtctgccatctaagacattctttttctttcttgggattagaacacttggtaacctctatccaaaggttgtttggtggacgaagaattagaacaaaaggtggagaaaattgagagcaatggtgggtcccagtgaaattttactaaccccaccaggagatactgttctgtaactctctcaaggggcagggcaggaggcaacatttgaatgtttgtttctctgttccatactttcttattgaccctttagtcgatgtgtttttccctttaggcctgtcattgttaaggtcaygttgctgaccttgtaaagctgagaaaaacctgctttcttccaataaatgttaatttcatcagctggtttctcctattatcatgacctatggacaattgcatgggaagtagctgggctgcttgttaaataatgcaaatctctggatcccgccatagacttatttaatcagagtctctggtttgagtcccagatcatgcttgcaacaagcactccatgcataggaaagtaaggaaggatgctccaggcagtgcagccactgcaggcaaaggcttgttggtggaactgccaggagccccgaaaggctgggcatacatttgggtacaaggtgttgaggagtgccagaaattcactaaatctattttcctgctagagtcattttgaatacaagagattttctttaaaaaccctttagagatatttacttttggtcagtcaccttttataggcccaggccctgtaattaggtcttgtgccatatcagagttcctgatcttgaagaacttgcatctatttaggaaatgcatttttaagacaatgaacaatatagccatgcataattaagtaggaatcctctagcacctaaccagcttctctagaaatccagagtgatgatttcaatagtaaaggatgacttaatggagggattagtatttaaattaggggtgctaagaggtatagaatttgactatggggtgtagaaagtggaaagaataattaaagcaaaagcacaaaagtaagcatgagcatattgtgttattgggggtattgaaatgaagtagaataattctccactcattctacaaattatattgtaagatcatagtatgacaaggacgggagagaaaatggtatgcaaagcagacacttggtcctgccctctctcatgcatccatccatgcatccatccacccactcaataagtagttgttgagtatctacattgtgtcaagtattggaatggaaactggcaacatggtggtagcatcaaatcagaactccagggctgcaagggaacacaggtctagagtaacatcatccttacattgctgtgcactaaattctgttgtggaccatggacctagcccaatttttagtcctggttcttccttgtctgccaagctctcatgtcatttgtaaaagggaactttagtaagatactgtagtaaaaactaaggcacctggcagtgggaacctgcattaggctactagtagctaggttcaatattcaaagcattcaaagctatcacccagatttgatcatggtaagatttgggagatgacagwtatatatatatataatgcctgcaagatttccttcctggctaataggaagtgtaattatacaaaagtctaacaggaaagttaagaggacaagtgaaatgtgttggtcaagacactatatcatagaagcaaaatctagcacctcgataaaaaatacattgcacatttattggacaatgaatcctagtgcaaaatcattaaaacaccaacggattatatatgtggtttcgttccatctttggtgaccagttgtgttgtgtttgggttccaagactcagtggcagcatgaagattatttctcctgatgtctcatgaagataactaagccctgttatttgtgtaaataataaagaaaataccctacatacacataaacctcaagacagactggaacagctggaggtttctatagaattacacaaatgtgaagacaatgagaaattgcaaaaactgaggtatccactgctgcaatgggctgtaaggctaagttcaactgatctccatatacagttattaatatgtggtagggtttgcaattctactgtacccttcattattcacctacttttgccatgtgtgtaagggtataattttgcatgtaygtacagagagagtgagtgttaaagggatagagggacagtgagatgtttacatactaaacatatacatacatacatatgtattccatgatatccagatgttttgcaggattttagaagtgcttcaccagatgtttgaatttgtgggaaatcatcacctgatactgttttggtgaactttcagaatttacaaaggctgaagaagatcacctattttcagtggtcatattatttttttctggcatttaattcttgtgtccctgctggtttcaacattactggtatttgcttctgaaagccaagaagattcagcttttgtataaacatcaagtaggtcatgtgattatccagaggcatcagcctggtcgttttcttcagagttgagtaggtagaaataattaatgggctggtttattgacatgcattgagacattcctctctttgtggttttaattcccagtttctatcaactaatttcagattttatctgaagcacctgtaattacatggggcaagaaaaattgctagccaaatgtaacctgataatgcttaatacaactgttagactaaatcttaaacctgatacaggcacacaagagcttaatgcctacgtcaaccagactgtcttttatgccttcctgtggattctcgcaagaatgagtcacctgattcaggaggcttaattctcagaaagcaaaatattgaggaggaaaccataatggcagcttaattcatcttaattctgtgctaggtctgagggatgaatgagagcagaataagagtgggaattttagacctgggttcaaatcaccagctcagctgtgcactggctgaataaccttggataaattactcaactctttgagcctcagtttcctatctgtaaaatgggaaaactagtacccatctttggggactgcaattatgtagaatttgatgtaaatctaccttctttctgatttcccaccaatggcatactccatgacttggtgaataaaaagaattggctatgatgatcattgctaattttattgttttgatttttcactatcactttggtggacaaagatattcagcaaagtgtgtcctcttatgaccctgattttacaaaggaggaractgaggctcagaagaaaacatgtttggcttaagtcagggcaccaggttagggaggaagtatagcacaggagttataagaacacaaggaatctggagccagaacaacctgagttttgaattttgacctcaccacttgccagggtgttttttttttttttgtttatcttgaacaagttagtttgacgtctctatgtctcagattccattaagactggtgagaatcagggcgataataaagtctacttccaaggtgattaaaagagcaaatttccccttgagggctttttgaggaaaggggcagacactgtcctctatcaagtatgastgaagtacctaactacctgaagacatgaggaggagccagataacctctgacagtcttgtgcccccaagaatggtccaacagcttaagggttcctaggatcactagtcctaactccagatttccgtggagcttgggtgtttacggtcccgtagtggtagcaggggaagagcagcatctttttgatcaggaaggaagttttgtcgtataaattaccataaatgttactacactcaaaacagtatgacacttacacaagaatacacaaataggtgaaacaatctagaaagaccagaagcaaatccaatacatatggaaacttaatctgtgatcaaaggggcgttcagtttgatggtgaaagatggtttgtttaataaataatgctggcattattcactttttatcagggaaaaaatattagacccctgtctcatagcatatacaaatattaatcactggtatatttttaaataatcaagttgtaaaaagtataacaataaaaatattttataaaaatgtaagaaaaacacgtatataacctgtagttggaaaggccatcttaaatgagagagaaaacccagaaaccttataaagaaaattatcaacaaatccaaccatacaaaatggtaaaatccttatatagcaaaatatcaaaaacaaggtttaaaagctagataagaggctataagaaaatatttataccatgtcacaaaaggttaatatctccataattcacatgacagctgaagttgaaatgaaaaacataaataacccagagaaaaatatgtgaagaatacgatcagaagagaaatgcaaataatcaatgagcatatgagaatatactagaaatatttctagtagctagaaaatgcaaattcaatcagtgagataccatttcttcctgtagattgctaaaaataaataataaataacatccaatactatggagattttggggaaatggatgcatcacacattgccgataggagagtaaatgttcatcatagtcactaccagtatctttgaaactaatttgacagcatctattaaaataaagcatgtgcctaccttgactgaacaatactacctttaggaatcttttctactgaaatgaragcaccagtatgaaaaagaatatctctgaggctatttattgcagcattgattttcatggtaaagtaagatggaaataactgtaatgtctttcatctagggaatgattgagaaaagtgaagtgcattcaaactgtagaagttctgtagctttacacaagaaagagaagctctattagtatggacatggagggacatccatggcataatgttactttttataaaaatacttcttttttagaaaagaacctctcaaatatatatatacatgtgtatatatttgtatgtrtgtttgtaggagtatactgaaagatgttgaatgatgcctaatacactttcacactggtttcctcaggatgttactggaaggaggaagagatgattacctcttgctttatacacctgtggatcatttgacctgttaccatacatacattacttcctttggtttttttctttgtttgttttaaagaaagaaactgatctcaaawtctagttccctaacctactggccaggtgaccttagaaagtcatttaacctctttgagtattattttcctcacctgtaaaataataataatgaggaggattgagcaagatwagatgtgtcaagttcctagcacagagcttgttaaacagggggtgatcagcaaaagagaattccctcttcctcctttctctttacctttagtgatgtgcttttggggatccagccagtcaccacttggaaccaagtacaaacaggaagaaggacgaagctgctgctgcacaaataagtaatctgacaactcccaaaagctacattaaaatgatttttctttggagttaaaaaccctattggatgacccatatcactgctcactgccttcatttatccagacattgagacctatggatccaagaaataaatgcacatggctcattgaaagtatggaattaagcaattaatcccttgacctagactcccatcagagtgmcctgttctgaaaccaggctgggttgggtgggcatctgaaagttgcctccctgtacccttctgcctggatccttcaccctcgactgtttctgccctgagaatgctacagtgttggaatcacactgtggttcatgctgttccccctcctcactcaaccccttctccaatgttttaaatccttattatagagccaacattatgctagaccatttataaatacattctcacaatcttcccaacagctctgtgaagtagctgtcacccccatttttacagctagagaaatgaagccacctagtaatttagccaccttctgatggttctgtggtaaggacatggtactaatgatcttttccccatggaataatagctgtatgggagaaatattggagaagtgagaagatggaagatgcagtggcttaaattttccctgtataatagttggcattccggtgataatccatcttagttgttaggactagtatatctctgtttgaggagatgattcaatgttttaactagttacaagactaaaaacacacctaaagcaataggattaaaataatgcactctctatgagtaaggcttaccttagcacttgagaaaagggccaggtcagcttgcttcttgctctgaattaatttaagccttaatatacacatacccttattataacatctatcatattttgttataactatttgttagcttgtctatcttcccaccatactgagtgtcctgaagagtgggagcattttgatttatctttctatccctggttcatcagatacagtccattaattttttagatgaatgcacaaattaatgattatgggttaaataggatatatgcaattccttagaggttcccaagtgacagccctagttctcaatgggagaacttacctttaacaatgggcagccctagttaaagaccctccatgtgctatgagtcagaggccctgcaatggaggaagaaatcatcagcaaaggggttaactttaaggccaattccatctatgaaataaatcaaatcagaaacagaccaaaagcctgcagcagtgggtattttaaacttgctcattaataatggctcaaagtggagatttattacagttgagaagagaggaagagacagtaaatcaggattggtgaggaaaagagcaagggaaagatatgagttcttatttaaaatgtattcatatgctttataaccccaaagtagagattgctatattgaagtggaaggctttatytgtaggattgaattcactagagatatgttttatgccagcgttcattttcccaactttcatttgctttcccttgaccaaaaagtaggggacttagtttattgcttgaaaacgagaaaagattgctttagctgagtgtcttcatgaaaatattccttgcttcaaagaatggcttgtaaagcactagttcctaggaaaacacgattttattggcacatattttgaagagaataattttaaaacattcaattagttctgcctttgaaatagaatttaaacacaccaaaagcaataggattaaattcacttaaaaacctatgtccccaactgttgcttgggaaccaattcttttcccattcaaactacttcaaggatagtcgagcttgctcttggctgtgttccatctgaggcagatacctgcctttaattaaaaaatcagaccatggtatttccctgctaaactctcagtggctttctattaacttggagtaaaatgcaaactccttagtgtggcctgcagagcactgagccatctgttcctggtctacccagccagcccccatctcatttcgctcttctcctcatctggtccatcaggctcaagtcgactgacttcctctctgttcctgaacacatccagctcttctctgccaagactgctcactttcgctctgccttggacatcctttctcctgccactgtttagaagcaactttcccagtccttccagagtctaccagctgacccttccagagagaccacccttgaccatgctacctaggttttctctcccatacatgctttaagctatgatccattaccgtcttgtctctacaacatgcttaccaaaaactttacacagatagacatatagaaacttgtttatctcccatatttcccactagcctgcaagattcatgagaataggaaccatatctctcattcataattgacttcccagaactgatggcagtgcctgacacatagtaggtcctcagtaaagatttgttgcatcaactttcagtgccaaccctaatgcctggcacatcagaggctgtcagtaaatgcttttgaattgaatttatcttgttgccataggayttagcaaattcacataagctgtataaacttattccaagtgcctaatatcctgcccacagcagcaaattctgctggcttaggacaaatgaataaggaagatgcctaaaagcacaatctaacttcggaacaccttctctaggacaaagaagtcaaggcmagttttaactctccttatcggacttgattcctctggttccttgctcttctgacctatttgtttttggtgaaaactttgttgtttttgtcyagacgttgccaaggtgtgttattaaacagctggagcttttttatttcatgggtctgaacaagcagctgataagttttgctttgggtttgccaaggctcatgatttaagcagttgaaatcacagagtcactgagcatctttcaaaactcactggacccagagccaagagaacgtttgggatttgtaatttatggtaagaatggcagtagtgccattgggaaatactttggcaagataacacatcgctgtgatgcagcagttaagttccatggtttargctgtgtgaaaattaatttgcaaaaatatttgggtctgttttgtgttctagtttatatgtaaattagaagattgtacaaaaaggatgccaaggatgatggaattcaaacatcgtcagactggttgtccattaattagagtgattcttactctattttgctttatttacattttctctcaacagtaagttgtattgatcaagtaaagacacagcattagctaataagccataataatggatgctttaaaaatawaagtttaaacatctgattttggaggatagccatggaaactaagagaaaaaaattcaacaatatttctcttaccttggaaatagaggcagtgcctgccacrgcattatataacccacttttgctccaaaaggtgacacgggtgtctataaacctgaaagataacactatgaagggtagatgaagggtagttaagtatcagaaccttggatataactgacagttctgcacaaacccacagggcaagtttctcactctaaatcttgaagctttcattcatacgcccatccttgctctgcatgtaaagtgggccatctgactcccatgccccagtaggcacaggcacttcatggacgcctgtttycacagccttcgtcctaaaccatttccctagaatctagattacaccacatttgcagacctagtctggtccattcggcacttgagttccctagactagcttcaatatcttaattattgtcccaacacttaacaccgctcctaacagcactgacttctcatttttatctgcactaaaaccttgcccggtgcagctgaccccaggaactatccctggagcagctctttgtgtgcaatcatccccatcaggtctcctcagaggcctgcagatgggacccaaacacatcgcctgaactgaagtcttttcacacccaggcccttctatgtatgttactccatggttgtatggctcctttaaaatcctaagtttatttagaatagttgactttcaaagcagtttgattcaaacctttgcacttgaaatttattttaactggaaaattggcactaatgttattcttgatttaccaaaagagaaatgatagcaaaagtcttacaggggtcttggcagcaattaactgaaatttcctamaatgatctgctcatgtatagagcctgctggagaggaaggggtttagagcagcagaggctcagtagcactggaaatcttgagtaatgttctttactctgtccttcctcgcctctacctggctgtgtgacctagagtggaggactttactccctgcctctatggccttaaatccatgtaatgaatttaagtcagacgatctctaaggtggcttctatttctgaaaagctattaattcatagctgatttaaaatcagccatccaggggtaaataaacttagatagcagttcagggctggagccaatgagggacacagctgagcaggagagaggtttctcacttsttcctcgattggctgagcaggtgattagcatcagagacgcaggctttgatcgtgaagtggggatataaaaccccgaaactgttcgtcataaagaattccatgcccaataaaagagaaggcagatgttcgcataaagtttttcctgtttgtgtttttgcgggggtactttttgggcatgacgtttattagtgaagtacagcagcagctgcccacccatgttgccacataatagcagtcttataatccatttatgggcttggaattatttttgttaatgcttttcatgggagtagatgaaatgcaatgtgcaccagctgtaactactttaatcatgcagctgccttctagggagagccctgcaagcatcatagatgtcttcattgtcaaagaggttattgtctcacagagttttaaaggtaaaggggtgctgtattacttttccgttactgccataacaaatgatcacaactgcatggcttaaaacagcagaaatttattatcctacgtttctggaggtcaaatatattctcaaggggttaaacatcatggtatcagcaggcctatattccttacagcaggaagctctaggtggagaatccattgtcttgyctcttccagcttctagaggccacctgcattccttggttcatgtccccttcctccatcttcaaagccagcagagtattatcttctctcctggctgacctctgtttccatctgtatatctttatatctctgaccctcctacatttctcttataaagacttctgtgattacattgggcccacccagataatcctagataatctctccatcccaaaacgattaacttaattacatctgcaaaataccctttaccatctaagatagcatattcacatgttctgaggattaggatagtaaacatcattggtggagagccattcggcctaccacaggaaccatgaagaaggtccaagggacacatgacttaccaagggccactcagttcacttgtggaggtgccatgactatatccctggcatgctcacatttgccacttgtgtgtgcgttackgacaaagactgctaggaggatgccctaatgaaggctttattttcataatttgagatgattgagggataaataaatataagatcaagtcagtgttttttttaaaaaaagtagtttagaaaagacaagtttatatttataatataagtgcattcataatgcaagaactttcttaaatattgtagtcttgctaggacgtggtaccttctaaaggtggagtaacttgtagtgataacatattttaagaaatgataagaaatgagagggccgaggaagcccatgcacatgtgtcaatgtttctcctcttcctcctcctcctctttctccctctgtaactcaggccattgctaccattttgaaagtcattaatgactaaaaakccaattcaaactccttaaactaaaggaaatggtctaccagaggcttattggcatggatgaaaccaaattagatatttgtsatattttaaaatgagacccatcttattttgatgttgaagtgtttgtctaggccaaggaacttatttttagttctcctcccatgtctgttacagttgcctataacaaataagagagtcaaagaatttgagtatctttggcaagtgtctccaaactcctcttttgccttagttttctccatctatgctataggcaagaatgatggctactgtaagttaaagcctttattcaatttaagtttaattaaacttgagtttctgagaggacaggtccatttaagaaggctaatgtgattgttaggctcatcttctccaggagtcactccctgcctcccctctaccatggcaggattggcttcccctcatccrgagtctcataacatactcgacctcacactagtgagcctccccagtgtgttagttgttcttgtgcttacctgccttcctcgagattcagcctaacccrgtgcgtgatgccaaataggagttcactgcatgtactatgggtggrtgaatgaatggccatataatctcaggggaatctgaaggacacatggatccagagactcgatggaagtactgaaaggggcagggaaaggctgaaagtatagttttgatcttcactgatataaaattagtaggttggctccccacccttgccctgaaaactttcttaaatagagagaaatcgaactggaaattgccacagaaatwcattctaatagaagttttcatgtgacactgaaaatgagtggacggtttcctttgggtatttgtgctcagctctyaatgtcatttttctgcctatcaaatgaacaccaattctttatctacaagtacwttaggttaatgacacagtgttgaactaaacaaagatgaagtcaagttgctaagctcttgtctggcattgattagggggctcataaaataagtcactccctcagtttagtcttgacaacccaaagaaaaactttgtgtacactgaatgacactttccttgaaaaacttccaaataggataaggttgattttcacatcgttcttgccagataggaaaagcacagcatcaactccagggaattgctaaatatttgtgctaccccaggcatattgcaaagatgatgagacctgaacaatgatgttagcattaaagtgttaatgatgactgcagtcaacaaagaaactgcaggatgagtgggcctcaaacaagaaaatctgatgacaagagancatgcaggtaagacttagagaagtggaccaagattcagaccaggaaaataccatagcaacccccaaggatctccatgggtgggaacatttggtggttctcttccattttaccacgtttgtacatagctctgtttatttatgttgtttccccaacctgctactcagcctaattctataatttctttttgtttctagttccttctttctggggattggtgaactcagcttggaatctttgctctgtggggaaacggcagtcgccagtcaacatagagaccagtcacatgatcttcgacccctttctgacacctcttcgcatcaacacggggggcaggaaggtaagccaccatattgcttccatggtaaagttgaagatggggccatcttgattctgaaagctaatcctcaaggcttcagtctctgtgatgagtttgtcctcccacctaggaataccacagacttcagacctgccgccattagatagaaatatgtctaaattgtgctttttctccctaactagtcaaacttttgtgcttctgattactctgtacctcctggaggttgcctgaagtcttatcagacaaccttggtacccccataaaggacagaaagcatagtggccacccctgcctatcatgctgggaaaatctttcctctaagaaactgctttactaggccttcttttaacctcagtgaagtgagaaaaccaattaacaaaaataaaatcagacgttcatcatcttgggaggaaaaaaacagacaaaaatcaccttagatgatttataagaaaatcaataattaatcttcctaggggcatcttgcttgctaagaatcctagctcctgcacagaaatgctgagctgggctttgtgattctcacacctaaatccctccttcactctcctccccccataacgagctcctctttaatttgtggaagggcacaagtgcccattgggtcttctcatcactggaatcttagcacttctcttgctggttcatgtctacttggctatcttttactgttgagtaggttgttaaaggtaaaaaaaaaatgcacatgcagaaaattgtgttcaaaggtaatttagctattgtthagagaaatggaaaataatttgtgtgcaaaaaattgaggttaaaattattgacaacttttgataataccagcggctgattcttcagggtttgggtcattgggctctgttctctcttcctttgtgcagtctgttcaccataaataccatgaagtttgtaagttaactttttccccttctgatgtattgaaatatattttcttgtaccatgtaactgtcacagatacacacacccctaatgactcatcaaaaagctgtaagtgactttgactcaggtcacaaagcaggttttaaaagacattgcatgtggtcgacaccatttagttatgcagtatttgtgtactgttttaaatatgacttgagaagcatttttgtggaaaggtcatatataggtcatttagtttattgctctgattccatataaaacgatgctatcctaattattgttccatttatagttttatttttataaattctgcaaggagcttgtcatggcttctaagtacatttctctttaaaaaggtgaawtatttaaagtcgtgaacacgtgtgagttcgctggtcagtatttaagaaggaaaagttgtagttatgattaaatattcagtcattctttctttcttggagagggtgatgtaggggataattgcattctaggcaaaaggaaaagcagggggtggaaaagcccaagatacagaatggggtttggtgcctgagttccagaatgcagctgaaaggtagccagcaaggctgaacacagggagcgaagagaggcttgcaagatggtaggctagagaggacagcagagggcaggtcctgaggcagtgttcgggagctgaatccttcgcctacgagttatggcaagcatttgaaggggttttagataaagtacagattgggattgagatggaaaatgtgtcaaactaacacaaacaatggatatataatttttactttccatcagaatgtcttaaaggaaaaatgttgatgtgaaagaaaaaaaatgtcaacacagcttctccctaaaatttattgggaaagaagagattgggagatagtctagtgttaaaaatcactcacatrttatgacttgggtttttttttgttttagagatattttttgaacagatgattttgtatctttccaattcaggaaagtatacctgatccaaaccaattttcaaatgcattggagtttggaatcttggcaacatttacttttcatgatgtaaatatttatatctggcacaatttttgttgtcagtggtttgaagagctgagaactgtctgatggttccttttgcatttgtgaaaggtagaaaataaaatatagttggtcgtgataaactaattggtaatgaaatgccttaatttgctaggcaataggtaaatcatgtttgtatcacattttgaaggtgatgtttaatgagttggaaacttgttttgaaagtgagaattcaaatcactgctctgatttttgttttcccttaaagaaatacccaacttaatcgatttgaaaatcaccctgtaagactgggaagttttgttgaatttgggcaagatgtcacattttgaagtctgagccaagctgggtgtcagtacgtgaaatgcagcctagtaactayatgttttgtgtcgcatttttatccacaagcattattctttctggtgttcaagtgtatcttatgcacaaaactgtgatgcagctctctggaagcccctgacttgcgttactatgtttattttaacatatttgacctgacattgggctcaaatgaaggaacaagggctttccttaccatagtttaaggctaaaattcaacctcagtacaagaatagcaaggaataatagttattccttctcatcctatgcactgtgccttgagtgtaatagaaaatattcatttttatttaaaaatgagatttatttcaccttttagcctcatgtgacaggttgcagtcaaaatgcagttcaaactgtgtttcatgcaaaaagttatttaaaatattgtatataattaccttcaggctatctacataagacataatgtatatgaaacatacatgaattttttgtttcgacttggatcccatccccaataaatctcattagatatatgcaagtatccaaaattartaaaatttgaagcacttatgatcccaaacattttgcataatgaatattaaatctgtaattgtatttttacaaatggcacgcccttaaggctgggttgtatgtagatataagactcctaccttggaaccaatctccaccctttgaccctgttaaatttaacatccaattgctacattgtttggagctaattaatccattctagttaaagctactaaattaacttaatcaaaaagaggaggttggggagataattctttgtggtttcaggttgcttaaagtttccatatatgaagaagtttgattatgatataaatgatgttttacactgagttaagcctcactgactgttttaaagattgagacccttgttagccattgaacttgtaaaatttcacaaaaatgttcacctttcatgtctttttgctcagaccaaagtgagtgtacgcagtgtgtttgtgttttaattttagtgtatagtcacataagtgagattcttggtaatttgaaaatgaaatacaggatgagaaggttaccgcagagtaaaatatggataacttcaatcaattattttggaatatagatatttgctttgaggatttgatataggtgggtattgaaaggtcgtgagtttagctttcaggaaggaaatatggcacatagaaacctatctgctgatctaaaatatctaaaaggagaaaaaacatattaaaactgagactaaaacccacttgccgattctatcattttaaccaaaactcagttccgtcatcttttctcatcttttaactcatttaataaaatagacacctcagtagttaaggacatgacaattgcttatcatatgttaagtataaaaagtaggatctgtcatatgttaggtataaaaggtaggatctaaacataattatcatatattaagtataaaaggtaggatcatatgttaagtataagaagtaggatctaagtataaaaggtagttgatgacacgacaaatccttatcatatgttaagtatagaaggtaggatctaaaaaagagactgggatgaaggataatactgttttattttttcttttctaaagtttctagatttgctaaaacagacttgcattaatttggtaatctgaaaaatacgtatgttctaacctctctttccatttcatttgaaaatatatttggagttgataaatgtggtagacagaataatgtccccttccaaaaatgtccacatcttaatccacaggacttctaaatgtgtcactttacatagcagaaggtatcttgaagatatgattaaatataggattttaaaactggaaggttaccctggactatccaggcaaaccccttgtaaccatagagtccttaaaaggaaaagacagaagcaggagagtccgaatcagaacagagacgtgaggatggaagcagaggtcggagtgacacagggccatgagccaaggaggcctctggaagctgcaaagcgcaaagaaacagattcttccttggagcttccagaaggaatacagccctactgacacyttaattttagcccagcaaaactgatttcagatttctaactccccaaatataagataataaatttgagttcacttgagccactaattatggggtaatttgttgcagtgccaaaaggaatctaaaataatagatgtgaacataaagattatactggtttactaaccacaaatcaacaaattatttttaaaactttttggcatttttgtaaaattatagtcagaaacagcctttttcctgtacaacagggaaacaataaaaatgaatctaatcacagattcatagcagcttagatttgtgagagcacctttggaagccagctcctgacacttccagtccaatgctgtggggtctaagttcctctccactctcagtatcatcttgtcatttctaggagttcttaactaccgatagttcttcatatgggtcctgtgtttggtctctgctgcagaatatttgacagccattttttctttaaccattttaaagtggatggttcagtgacattgagtacattcaggctattgtgcagtcatcacaactatgcatttttgtaacttttttatcatcccaacttgaaactctgtacccagtaaacaagaactccccattttccatccccctcagcccctggtaacctctgtcctacgttctgtttctatgaatttgcctgctctaggtacctcatataagtagaattacataatatttatcttttttatgtctggcttatttcactgagcataatgttttcaaggtccatccatgttggagcatgtatcaaaatttaattcatttttaaggctgaataatactccattgtatgtatataccacattttgtttgtctgttcttctgtcgatagacatttgggttgcatccagcttttgattattgtgaataaggctgcaatgaaaattggtatacaatgaactgtttgagtccctgcttccagtttttctgggtgtatggcaaggagtggaattactggggcatatctatgtttaactttttgaggwttgtcacacttttttacacagtggctatactattttacattctcatcagcaacacacaaggattccaatctttccatatcctcacagaaacttgttgtttttttttttttgttatttattttgaaatagccatcctaatggttgtgaagtgatctctcactgtgattttgatttacatttccctaatgaattggcagactttcacagacatccagtacaagtttttggaatacaacctgttcctgatacagagggtagaagatcttgaaacctctgagaaggagataggttrtagaaataattgaccttagcctaatggcacagtcaggaatataagaagtaaaaagaagcagggtgcagtggcttgcacctgcaatcccagctccccagaaggcttaaagcaagaggatcacttgaagccaggagttcaagaccagcctgagcaacataataagaccccatctttaaaaagagagacagagaaagagagagaagcaaaaaagagaagaagctggccatcagcagactgaagacctacattggttatctcaaagaagctgatttttccccatatcttcaggttttttgtttgaaattttgcccagcaaaggctaaaactactgttgtcgccaatttccttttgatttctggatacctggggattatatcagggagagtctcagcaagagacatggaacatgttgagtcatgaggatccctcatagagggaccgtttataaccaccccaggtctggaaggggtgaggagagggagtgaggaccagaacctggagaccaaatgaaccaaccatggagaggaacacctgaccttcagtgagggaagcaaccagctcagggcaacccctaagggtggagctggggaacaaggctctgactgcactcctttcctcccctcttatggaaagaaggcagaagccaaaggagcttgttgaatcagtccatgcaagccagcctccaagcccctaagcaaggtaaagatggatccaaatggacgatcggaagacatccaacacaaagctataggtgtatctacatggaagtttccacatttcccatgaaataaatacgagctaataaaactcttaattgcttataaatcaggtataaatgcttcagcctggcattcacagcccttgtaatacagcaccaaatctcctttccacagacatttgcattatacttcgtacataccttttgttcccagtgagagtgtaaactttaaaaaacaaacaaacaaaacaaacaaagtgaatgcatctctccttttcctgggatctgtgctttggccacaatatacccttcaccccacttgcctaaggagtccgaacccctgcttttaacctctgtggctccaatactatctcttaaattcctcttgatctctttagctaactgtgaaatctctctttatttggcttcttaagcaccttayttatatttattttaggatctgaaccttggcctgtaatattaatatcgctttccttgtaaggaatagtaagacaaatatactatagatattagcccttagattaagagctccttatgataaacatgctttcatattttcattttatatccttggggttatccatgacagcgctgactgatttgaatggaaccaagagtacccttgcttaccaagaaatgcgtttaggtggaattcaccaaaagttgctacgatccaaggtggggggaatgtgagaaggcccatggggaaaagaactttgctatccacagaatctgttactaaaactaattttcagttatgttttttatgactattaaaataagttgaaaaaataagaaatgtgaattggtttggtatttaaaatcttatcacttctctattttaaaattttcctctgaacctgattgcaaaatttaatcattgccattcacggcatgtccacattgctatgttctgaaacctcttatgtttgaggcttttatgttccttcaaaaaatttacgatatatttggggagaaaatatagacacacagaagctaaatggcagtaactgatttaaataactatttgagataatagcggtatagatattaagaaatgattaattagcaaatcaatcatcttggcattaatgttttaatagagtgagaagttgggttkgtcaaacaagactttatggaagaggtaggatatgagctagcatgaaaagggagatagaaagaaatgtaacttgcaggaggatcttaaatgtcagatgatcttactctatatgcagaaggtggaaagaaaacaaaaaggtcgatcaattttgtcatctaaatgtgttgccgtggtgctggtttttattggataactgatgttaaattttcctggataagtatccttacccatttaaaactcaatagctgtctttaagcaccaaaggtctttttacactgaaactctgatatgaaaatggtatgtataattttatgtatgtttgtgggatacagcagatctttaagagctgctgaagaagtggatgcaattcttactcatctgtattttgtggttagacaaattcctttattgacatatcaattatatcctttccaggagaaagtgataggggtctggttatttaattctaaccaacaaggaaaggcttagtgatgtggagtggacagtaactctaggaaaaagtaggtgtgttatcttagaaataatggtagcaaggttaaaaaaagaaaaaaagctaggcattgtcagacatggatatgaaaacttcaaaaggcagatttttaaaatatcatgattaaaattgatgtgatctcattgcttcatggaagatggctctagtggattgggaagctcttaaaaataagattatggtgatagaatcacaaacgatagtaccgaaaaaggaactggcaggagctaaagatatcgaagtggcagcacggggaattttatgagaaataatattgttaaatggcatgtagagatgcaggagaaagggcttagagccaaggaggaccagaggagaaatcatttgtcaatggtttcacagagaatcaagcccaggacaagttgaagtttccagaaaatgaggagcactttaaaaagttgtggttagaggaaagcaggataagcaagacaatgtatacctccatttgggagagaatacatggccatggatgaccagatgtgagaactgagtttgaattttagattgctactgtctagccagcactatcgtagataaatgtgagaaggtgctggttgattcaaaatgaaccaagattatctttgattactaaacaaagggtttatttggcttaacttctctaagcttcagtttcctcatttgtaaaaggagcatcatcattctaccttccttgcagggtggtggtggagagaattatatgaaaaaatgcacttaktaggcaggtaataatgcaagttatcaagccaatgactggcagagaagaacatgctgttagctaccatcacaggtgtttttgttttcagcaagaaaacataactcccagttgaatttctttgtcagagaaactaatgtttgcattagaattcatagcatatgtagagagaggtgaagtgatttcaactctatggaagacagaagaagaattcagagccacctcgctagtaccccaaacccaaaaggcataaagataaaactttcctctcaaactatatttacataaaatgtcacagattcaggccgagcaacatattctgtaagaacactacatgtgaaaaagtacaggaagttaatgaataatatgctcagttgagtaaatagcacaggggaaatgccaagagatgaattcagtctaattacacagtacctgaggttctacatccatgacaagtgaggccattgtcatgcaatacccttcactgagaagacagtatctggaatgttagcatcagttcccctagtgctgacagtaaggttaactaatrgaaaacacattgacacagtaaagtacagaagaagaggaagaaagtaatgaaaaatcaaaatgttttatattcagttttctctgtctatgcatctattggaaaggaaaatattttaagaagtcattacagctgattttaaatgtaccttttctgtgcaggctcagacataggggagaactagctctgctgtttgaaagtaactttggccagacttcaattcaaaataagaattcaagctatgtgaaaattgaatgaccttctgtttcrtggagacccgtggcacagaaagagttctgatgggcactgaggggtacttgaaattgtagaacacaatgaggcatcagatgagagctttgacttgacctgtgaatccccttccaaccttgatgtactttgattctgtatgagcagtggttagatgggacgtgtggaatatatttgcttgcagccatcctggaatgaagatttaactaggatgtaaatcctcctaaaggaaaacaccctttaaagcactaacattggaagaaacttgcattgtcctcttattaaccactatcaaaattattcctcaaagttttggatacaggctctctcctttggtatattgtactctgagtagctggaatgaaggattcagagcaaaatgaatgttataaaagaggattttgattacagattttaaaatgagaycraggtagttgtgtttatactcagagcagagctttttgcagggagcggaagatttcagtgcatagcagtgaaaagtgatgaaagataagcaaaatgtgaaagtctaagatgctgtattttaagttgggaaatggattcagtgcagaagcattctgttgtgggtatcaggttctcatgcaccattgctgagtttagatcttggctgaggattgccgctcactgtcttggcagttctttgtaatgtttacctcttgacatcatccagaaaatcaatgcagagtcattaggcaaatctcccaaggaaacacctggttgttggctttagtatttcataagtgtctctaattctctctcattctttactcctcctgtgggtattagaaaggactttactcttctttcctgcatcatgttcctttatttctctatacttcttctcattttttctcattttttcatctcttttactctcttagccttttcttttctctccagtctttatctccaacctcctccctccctttcatcatttccctgtgtctctttccctgtccttctttccctgtcctttcacttcctcttttctcctggttctgtatacatatgaccaaggaacatgtgccttctcttttctgtatgagtgaaattggttctccactttcatggaacattttaactaaacacagaaagattgacagttgtacaattttagtgacggtacttaaatgagagaaaattcaagttatcccagaactgagtataatttttattaaaaattatagaaggactagcttgagatgtttaattaatttataggcagatgaattcctacaagagagaatgttttccaggaatctcatgagttcagtagccatcacatcataccactttagttttctggttacataatcccacagataaaactaacaggcatttggccaggagcagtggctcacgcctgtaatcccagcactttagcaggccaaggcagrcagatcatgrggtcaggagttcaagaccagcctggccaatatggtgaaaccccgtctctactaaaaaawtacaaaaattagccaggtgtggtggtgcgcacctgtagtcccagctactcgggaggctgaggcaggagaattgcttgaaccagggaggtggaggttgcagtgagcagagatcgtgccactgcactccarcctgggcgacaaagtgagactccatctcaaaaacaaacraacaatcaaacaaagagaacaactaacaggcattttacaaaacaaccagcctcttaaacataggcaacaaaatgtgttattcacataatactgcttgcagctcagctctcttaccatccatctaaacatgggagagaaaagaaaaaaacatgagctaagttttacagrctagctccacctgtcaagcagcctgagacaaatggttttacattagttaaaaaggtaagactggtagatctcctggacagcggcagaaacagtcacacacacccaagataagcttttgatgctgatcttaaaaagctggtatcagttgtacattctctccaagaaggctctgaaattggtcgatctactccttgtaagcctgaccatttgaataaacccacaaagttgttctatgtaaacctcagacactttgaatcctattaaagggatattattgcctataaaccaggtatctttggttggaaaattaaaataaaaataaataataatatatctactacctcagaaaagaaaagaaatatagtagattctttttgaaggacttaagaaaatgctcattttcttctaagcttggtttctgaaacaaaagaaccaaattaaaactgaaaaactggaataaataatgcaatttgaggagtctatgcagcgtaggcagttgaacatctgagcagctcccagacttaatttttctgatgaagatttaatgtcatatagatacaactttattaatgttgcacgaaagattaagaataactaaaataatccatctctttccagtatctcatattcttaacgttttaaaaagttagatgttttagttccttgctctgtagtatgctagggccaaaatccaaactgcaaataatgtgaaaataagccattcagcctaatatctgtttttctcatagagcaaacccagtgtctattcagtaaggcgagagttttattttgttaatgttatctttgcccacctgatgttctgaacagattagtgttgtgtttttactcagatcttcatcagatgtaacacttgataggatgttagtccattctggcccttagctctgaaacatgcatgctctaacccacatgaaacatttacatacaatatcataagatgaaggtacatgatttcatttttaccagtgggtgaaaatgtatacacgcacacagtttggtacgttatatctaatagaaacctatcaaactagcagcatctcatctgcctaaaaatattttctgccaccttcctatcaagaatatttttcacatctcatctaaggagcagagatttttctcaatttgcattttcctctgaaatattcagaaactattttttttaagttaaggaaaagccactcttgcttccttttaagccaagtagctattttcactattctcagtataagcaaaatgcattacttgcactatgatggagaaaatgaatacacattatacttagtatgttgctatttaatgcatygttgctaggtaggtttgaatacagaaatcaattcagtgtttgttgactctcacgtcatttattctgagcttgtcaaattcaaatagaataagagtttcacaaaattatctgttcaaaataagtgttgtgtcacccttccagagtctgatgctgtctaagcataggtttagagcttgagatgagaattcttatgcaaataattttctgaagaagtttctcacgtgaaagctgccagggaatgggggaagtaggcctggggagaagttcagcaaagatgatagtttaactggagtccaaccatagcctgatcccacagtaatatagttgggatattgtgccctccaaatctcatgttgaattataatccccaatattgaaggtagggcctggcaggaggtaattggaccatgggggtggatttcccatgaatggttgagtgccatcctcttggtgctgtactcgtgagtgagttctcactaggtccagttgtttaaaaatgtgtggcatcttcttccttactggctcttgttcctgcttttgccatgtgacttgtctgctgacactttttctgccatgagtaaaaactccccgaggcttccccagaagctaagcagatgccagtgccatgcttatatagcctacagaactgtaagccacttaaacctcttttcgttataaattacccagccttggctatttctgtataacaatgcaagaacagcttaacatacacagggacctcctaagcgtgaataacaccaaagtgctctcatcctgccatgcactcctagggtctagggaggcagccttcagtaccttctgaaaggcacatctcttccctggtattcccaggcaaggtgtctcctgtacagtggtatccttaaggagctggcttatcctgcctttcagagcccatcatgtgtatctattcccacctccacattgggtgccatcaaggtggtgacttgaaatccaccatggtaggggtgttaacaccacagaaatctgcaaatgctacatataagcccycttttttatctggagagctggatgatagagatttatcagcacacagcacaccactgttcttagaggtcaagggcaattcccagaagaaaggtgagttgattgcagtcaaaattaatagaaactgggggacatgtctagtggccttaaaaagtaaacccaggtggatcaccaactattgtagctggtgttggaaagaaagcctcagattagttacaaatattcatatcggaaaggactccrgtggccatggtttggcctcctgaagaatgattccaacggaactgcctgtgccctgtatttcaggtcccccaggcccagttggcactacctcattccaaagatgaggggcrggggagagcataggcttgattatatggagctatgacttttcttactttcatcttaattcctcttttaatacaactttgtattagtctgctttcatactgctgataaagatatacccaaggctgggtaatttataagggaaaagaggttcaatggacctacagttccacatggctggggaggcctcacaatcatggtggaaggtcaaaggcatgtctcacacggcagcagacaagagaatttgtgcagggaaactcccttttataaaaccatcagatctcatgaaacttactctcacaagaataccatgggaaagacccattcccgtgattcaattacctcccaccagatccgtctcatgacacatgggaattgtgggagctacaattccaggtgagatttgggtggggacaaagccaaaccatatcaatcttctttctttgcttgcctcctccaagaccatagtccttctagtggcacctttgcaatgataaggatggcatataggtatggcttttgcctaatgcctttgcagtcacaatgttctcaacttctttaccagtttaagcttctacccctccagagcctgggaagtcctgggctatttcacaacccaggtggcaaccagcttctggccaatgacacygtgtttccagcagcgtagcatgcaacaatgtgaatgcatgctggaaatacgttcaaaatctaaagagaggaaatagaggggagcttttaggcttcttcaagtatgtgatctttattctacaaattgccttttaatgattcacagtttctgaatctaaaaggtaaggttttttttttttttaaccaaaatcttaatagcagtgaggaaatagccctatgccaagcagtttgggtccatgctgttcaatcaattcgacgtattactagcattttcctcaagagtgtaatatatgacaactgccaagctttccttttgcgattacaaaaaggacagatactggagtgagccatatttctgcactgcagggatataaaaaatgaactgctaaaaacggcccgggaggaatgaatagcaataagacatcaatgtcatctgtatactgatttgtgatgaatttccaaaaggcttaatggtatgatgctatgatatataggggcctcctgaaagttaataactgtaagttatccacttggaggaatgtaatgggggaaaggaagtggtcacagataatatataaataagtaattttattaatatagtcaaactgttctgtgttgttggcctctgtgattagaaatataaaattaaaagaattgtgaagacatgggaaagctgaatgttacacawactcccaggattacacacttggtgagaactttaatttgacttttaatagatcggaatcaatctattaaccaaagggaagaatgtaagagtttgttgatcacctttcagaggtgaattaataacagagacttctaaaggaggcattcaagtgggagcaacaaaatctgttttgacgaacaaattgtccttgccrattaccgtgagatctggtatttcctacgtggatggtgtaacatccctgtaggatgcttgagacatcaacagatatgaggcataagatgtgcataaagatgacccctttcaatctacagtctgggttccttttggcccactaatttttatggctgtgtcagcrtctggttagcagcaaagtatgtaatatacagaaagcagtcaatamatgtttattgaatgaaataataaatagatgaattctaaaataccccagatcctggaattacatatagatgaaaaaarggaaaggaactaaatatattgagtacttactactgccatttatacatacatattttatctcatttagttccccaaatgacctcagatggccagttttacaaaccaggaaactgaaatgtgcagttgttaaataatttacccagagttacagagatgacaagaaacagagctgagtttcaatcttaggttgtctgactccaaaactggtttcctttacagaacattgcactgaaactgaagacaggggagaaatacattccatctatatcaagggcttaggaagaaggcagcatgggtcagaagagccctgaccttcagccaatttccttctctttgccatgttttgagagcatgagggatggtgggtgctctgataccaccatatttcagcctattaattgcatctctgcagcctgtttgttttggctctagcactatacgtattttatccttaggagtggtgttacatgtctgttttgttatctgaccattgctctcttccctggyaaggtggcaaatcacatagtgaatttcatttctgaatgggtagttaatttttttacaygttycatcaaaaaaatggcacataaaatgcccaagatagttgtcatcactgaagcagttctggcagcyatagagtcaggggaaaacacatagttttaatttctaggtcacgatatgtatgctttttctctgtaaaaaatggcartggtgctctctctgtctcctctgcagcctctcttcctggctctgtctcttactgtgaaatgaggacagaccttactgtttttgcagctggggtgttcaccccaaaagcatgattgcactttggaaaccgtaataggcacatttccaagttcctcagggctcrgagtggatcaggaataacttttaaagtcatgagcctcaaaggactggccagtgtaaatggcctgtctctgtttctcctaggcagtcatcctttragtcatttcatatgatgtgcataatttaacaggggcaaagctgacacatctctgccattcatttctcaggctgccctcagttctctgtggataataataatggtaatagatggaaatttaagatttgtgcttctcctagttcagtgttaagactgaaaggaattcaagggtgaccctcagttcccaagtcacaccaasaagaggatgatcaaaggctttgattgcaatggtatttggctcagcatccccaccaaacactgttgctgccagcttaccccagcctcccagggtcatcccttctgcacagtcctgggagacatatgtttccttggaggctggtgcttggggaggtgcggtcattcggacttctctaacactccactcttgcaagcactgctgaaacatgacacagctactcccatcatgacagtggtatttctccaaagcaaataaattgttcccaagcctgaaaggtctgaccttgaagggactttagtcttctttcgagtttcccagaagatggcatggctttcccaaatttcacaaaaatctcagacaaacaatttaaaacaggatccctgaagacttgctaggataccatttgagtgaactgcaccaggtgagactcagagactgagtcaccaacacaaagatgtctctcctaggcatatatgtctttagactcaccctgccttcagttcttcaactgccaaaaattggtgcatttcctcccccctgcttttctggggattctcactctcagttccaaagtttcctttgctatttcctgagagtgtcctgaaacctttatgtaaatgtcttagaggctagaatcaatacccttgtgattctaaagagatatgcaaattcagctccgacttaactccctgtgcacgggaaagaaattcctcccactagcctgccattcaggaggaagacttagttaatggatgccttccacactgccccttagcttctgcctcttccccagctataaagagtgggcaaagccactgggttgagcttttcctcctgtaactgaaggatagattcttagcacagacaagtgaactgcctgcagaaggctatgagattctttgaatgctattaatgtgaatgcagcattattagaatgtactttgagttttagatggatattttatccttttgttaccaaggcttttcaaaagataaaatatacattgtactgcatggagtatatgaaagttcggtagaatatgatagtgttgcttcacatgctgttctcttgggtatgatatcaggaaaatgttttcctctgacagcctcttataatggatgaaaatattccctttcattgcacacacagtgcaaggtttgaggcatattattggagtcaggtaatctgcctctgaaatactggtatttgaaaagcaaatttaaggcttaggacgttttagctttatgatcattgacactgatgttagtaaactctttcactagctatgaagaagagaaatggcaggcaagtttttttctttttttctttttcattgccatttgcttggtagtgactgcaccatatggagcacagtaaataaactatgaagttggcaggatgcatgaaaacaaggaatgcacttggactccaggggtccctaagcaagttactttacctccttgagcctccttcctgacttgtagactggagctaatattttaaaatggtggtaaggattacagcttattggaatgctcccattactgtgcctagcacatagtgttttcagaatttaattttaattttacagagaaatagctgacccttgaaattatgtcagtagaggctactcatgtaatacccttgtgatttgaagtcggtgttatttattccatcaagtttgctatactacttagtccacaaaagaggtaacggtgctacatataacatggtgaaataggtgctagatttgtgggctttatagaatgtgatatctgtacttgttagtcttcatgaagtgtagtaatttacatgaattactaaagtaattgctcatgtaattataatttgtcatacatttaaccatgtctaatggtctgtttgcttatctctgaggctgcaaattatttggcacatagtaggtgcccaattaatatgcactgaaattgtttgtcggtgcttgataaatgcttattatatttttttggactaggatggccaagctaggttgaagaatatccagaaatttgagtgatttcattatcacttctatgatgttccccagaaaatgacaagtagataattcaaaattctacagattctgcagaggtatctccatcatatcagatgattagtgcctaattatagaccaactagacttccattttggttttcagactccttctgtagctcattactattctgtctcattcttttgcacttctcgattgtcctttttstatcattccaaccagcagtctcaactcagtgtttcattcctgcttggcagaccaaatacaaccagggcctattgcaatacagaagcatccatataacatgtcaactaatggatctggtaatgctatgcagaatgaatcattttctctaactcttcatttgctcattcaatttggatatgcgaataatatccaagagcattctctcacttagtctgcacaacttcatgaagtcgtcaaggcagggtgttagtaagttattgccgcaataacgctatctatccaccacaaaaatctcagtggtataaaacatcagcgtgtatttcttgctcatgagtcttcaggtctgctgggggaggtctgattcaagcttcaagtcaaggtcagatgtattctatggcccagggtgaagaggcagcagctacctagagcatggcctcttgactgagattaaaagcgcctggaggggcaagtggaaccacgtaatgtcacataatgctttaggttcaaaatcggcccacagccgtctccacttttcttccactagccaaggtgcattatcacctatgtcttccacccacattcttttcactgcagagactggcttttacttgaaaatttaacatagaacagttcagacttgacaaaagtgataaattgaaaggcgataacttacagaccaaatgtgtcccctccctgcaatgacaaacacatttaagattcattttgctttgcaaaacttaattttatgagcagtttgggggaattgctgttggcattttgtaaaggacattgtgtcattgggtcttcctgaaggaagccccagatgagaaatttctttaaccctaattgctaggaaaaaccttgcttcctttgaacaatcgatgtgttttatttttcctctctgcaagaacggcgtaactacgttgtccatttccctttgagtgtcaaggccttcagarccaaattttcacttgtaataaagttagaggaactttataaactggtgaattactctagatcctgccattctatctgaatttgtctttaatctgcttcgatttttgttgttgtttttgttgttaaacgtaatgttagatacaatatgtttttcttatcctgtaagccataacaactcttgtrgaatgaggcagggtagaaggaagaacaaaacaattaagtgaagctgtgcaccatcaggaacagctgattcagaagagggacatcagctggtgtgtttccctgctctttcgttgttatcagttaccattggtagaaggatattttgtttataatcaaaattaaactaaatctttggagattaagttttctgaaagagcttaagggcaggatcaagggggattgagtacattgtctctaatgctgccctctcaccatgcccctctctaagcctctcctccccccaccttccaggatgaacccacaaaaggacatgagcctccccttctgttattcattcctattaccctgcttctcatggtgcatctggtttaaacagcttcagtcaccaggatgtgaaaagaaamgatgacgataagaggaggagcagatagattaagcaagcagtgcagggcaacattttattacatgtctataatttttaaaattgaagcgaaaaatttttccaattacagagtggaagaacttgcagtagtttaaaagagccagtgcagtgaaaatagagaaggkggttatgggatggcaggcaggctgttgaagaaaggagtctttctcgacattcttgttactttctgcagttaacatcgatgagatgcaaatattgcggaagagtgaatactgcaaatctcagaggtactaaatgatctaagagaataggatgctttttctgggaaactaaattataaaaagctgagcctccagttgactattaaataaaaagctatcaaaagaacatctgtagaagattccctgaaatggggtctttgtcctctgaatagatgattggaaattgacaggttccgtttcatctcaacactgtaattttgttcttataaaggattgctttttatttctaatacttgccatgtttctttagtgtcttcccatgtctcaaaatagctcgaaaaaagagcagasgacactgagcttccccttttcaaatttgtagcatttacctctgaatttcacctgacttgtgtggctttcagttccttgaaatcatggtaacaagctggattctcggtcttcagataaatagtgactaattctgcaagcctgacctccagttccaaagaactctgagctcccccttcagtgtaattctacagaaccagggatgacatccagtcatctttggtattgctttagctggaaaaaatgagtttttttgtctttaacagaggctaggaaagagatatctcagtacacctttcaccttctatctcacctgtgacgaggaagtgcctgcacatttatagtggctatggaaagatagcacggctgctttgaaatatcatgtgcgctggagcatgttttcactggaggtacagtcttccctgaaatgtaagcagctctatctctggcttttgcagmaaaccagatgacgtcaaaaaatcagttatgaaagccaaggacattttattcagtgagagtggcctattttactaatgtctttgtgtcgatatcagattagcataatcagagtttgattctctctgcatttggacagatgttacagtccatggctttcctagtgatttggtaaagtagggtactaaatacatcactggaatataagtggtgacgctctgggttttaatccagtgaatgcgacaggagtcatttggaagatatagcatcattccttatctgaactggctttttatttagtaactggatttgtgtttccccagtagtcaggaatgaatgtggtcagtatacttagctattcctattggctccctcccattttattttggtgtagagctagctaataccaaaagtgtctaaagtggaagtcaagaataagaagatgtggagttgaatgctgtcagaggaaaactcggcttcttaacaaaatcaaatctagcaggcaggaactgccaacatgataaatattctagtctttaatatcagtatacataccagggcagaagaaaagaagaaattattcacacactcaaaatttgttaaaattatgtcatttgacttcaagggagagaggcctacggaaatgcaaagttcagatggaaacctcaggctgagcctgactctgggctctcctgatgtgtcaatatgaccaaagtaattacactgccatgcatgagctctcccagggtcaccatttgtgggaatgagttctttcaattaatctgtgtgccttaactaactgcaagtttcatctggtaccaggtgcatgcagaagcaagggcagaatttcaaatggaactgaatttctaattgtaagttggaattgcctggatggtagtgtttgtgsrtcagagaacacagtgcctttgagatcacacaggactgggtctgatcccagcccttctactttattcattcatttactcactatttattgaacacctgctatgtgccaggcactgttttaggctctgggaagataactgaaaattagacagatgaggtctaagcactggtgaaccttatgttttcatgaaggttttacagatcaggttccccaggaaacatcctctgacatggacattgtgcacaggaagttcattggaaagggctcttgggcttaagtcctgcggggaaaaggaagaaagaaggaatggaccgtgaagcaggctcaacaaaggctgaagctgacctcgtggaaagctctgaaactgggatgacccttcaaaatggtcccccattgtggcgagggaaccctcatctttagacaggtgtataggtcagtcattgactgtgggctcactgggaatgaggtgcgatcttgcacaggggctcttatcagctaaagacaatcctgggaaagagatggccactgagaactcccagcagytgggggaataagtccttcagcctcgaagagggatctggtcaggaacagatattaaaccaataaagtacgtagatatatatacacacatatatacatatatatgtaaaatatttttaatgtggtaagttaataaataaaacagaatgaaaaaaggccagggttgctattttagatggggcagccgggaaggccccactgaaggaagaggagccaacctcttccttcctcttcctcaaatggccaacatttgagccaacctaagtggagtaagcaagtgaacagcaggaagttgattattgagccaaagagaacagctgctcaaagaccatcaggtggtacagacttggyacattccataaacaggaagaaggtcactatgaacagaggacagtgagcagagggcgaattcaggttacagaaaaatggtcaaaagtctgattgtcaagagccacataggctatggaaaggagtttggttttaatgctgatgttacagggaaccactagaaagctttcaatagatattggaaagacttggtacaggttattgaaagatcactccaactgctgtgtgctgtgtgaagctgactgtacaaggtaaggatggaaacaaaacactaggaaaccactgtgtcatctggaagagacataagacatggttgatgcaaggtgcagataagtgatgtagtgcaatatctgtttcaaacgtagggcaagmaggacatgcagatggattggacattggttgtgagagaaggagagtagtcattgagtgaatggccctttgatatattgagatagagaagactgaggaaggagtggactttggcagggatgggagatcaggaattctaatctggagttactgagtttgaggtgccttttaaacatgcaaatagaaatgtcaaataggcaaaatacatgtctggaaactaagaaagtggggctgaagatataaatttgttggtccatggcatataacaaatatttaaagccatgggcatacattagactatccagggagtgaatgtagttagaaaagagggctaagaattgagtgctatggtatcctgacgtttagagattggcaggcagggaaggcaccagcaatggagaccgagatggcacatccggtgagaaaggagggacatccagaaagtgtggtgccataaaagccaaaagaagaacaaagttttttcctggagagagcaattagctgatcatttgatttagcaagacagaaatcattgatgggagcagtttcagtggaataccggggggaaaaacctgcttggaaggttgataaatgaatatagaatgagatagcgaagacagtataaaaaactatttaaaaattttttgacataaaagggagcacaaaakgggggtaggctagctagagagaaatagggatcaaaataaggatatattttaatccaggacatattaggatatacttgtactgatgggaataatccaattcactggtgatgctaaggaaagacagagtctctgtaggtgtcaagtcctcctccacrcaagataatgtaggatcctatccaagaaaggaggtgctggccaccagcaggtgaagggacagcttacccccataactggagggacagaggagggtttctgtgtgggtacagctggggaagtaggtttggttgtgggaggataaagtagccctgctttatattctcaaatgagaatcaaggtcatcaactgagagtgaggagcgggaattggaaatttgggtgatggggaaggcagataataaaatagctagccctgaatgtgggagcgtgagttgactagagtaatgtgggagaatggtgaaacacacttgagatttatggttacagatgaaatgataactgtatatctttatccagattcattaaatagcctggggataagaacagagaaggcagagagctaggtccaaccagctataaggaatgacaggtgagtttgtttgatgaaagacagcagcaaagggtagagttgtaaaaaaaaaaaaaaaaaaaaaaaaaggactgatagggatgatgggccataaactctaagcaggtaaggaggagagccagaaaatgatagaaattccacttactagcatgtggcacttctatgccttgtgccaacaggagaaaagaagtgtgcccaacttaaccaacagtcaagagcttactctgtgtgtcatacacttttagatcacttctcaattaatctttacaatgggcctatgaggtcagggagaattaactccacctgaggcagtgcaaaccttttgcgcaaagactcctatctccaagcctaagccccattttccaccttgacagctgtcttagtgccacagggaagcgtcaactgcaatttatggagcactgatggataaactttttgatttccaatcttagggcaaatattcaactgcttattttgtcatcatgaagagaatatagagaatttacttacacctttgatggttgaaattcttgtatgccttacaattatctatcgtgctgaatgtgagagcaaacgaagcagccaccttaggaggttgggaacatgtaaatagtattttttaatgtttctaggtctctgtgaaaatgtaacaagtgaactgagatttagaggattaaataattcatctaagtatactgaactaaaaagtggcagagcaaggagcttcaaccagctctgaacaagctggagaggtcccaattccatagggtttgtattacatgcattgcctccgataggcatgagaagcagaagcagcgtaggatagaggctccctcaccaagcctgcaaataatagaggtaaaggggcttagggatagattagagaaggcattgaccctcttgggcatgaacttaatatataaacaaactgagctagaacttgctccttatgcatataagatttccaaatgcatatttttattgtgagttttttgtcctttttatgacttaaaagtgtatcacgtgactttttttctatactctggtgaaaaatccctagcaaatataaaaggagctctgggccttcttcatggataaaggatggatgaagctgggggactcttcttgcgctgcagtggctaattgagtattcagccccaaagctgtgagcatgaccattaagaggcaaggagctgggcctgaggaaaagaaaaatggtgggagaggggtgaggggtttggatagatgagccagtttaggaattagaaagatctctgatattcctgtaagcaggcagcctcattcctccacattggtcaaaggagagaacaaaggcgacagcactgtactggtcaacatgaccttctaagaatataataagagttttttttttttaagagccatacattacatacatcaagggttatctcagattgcctggggctttctcagttttaacactgaaattcttgcatcctagaaagcccctccatcctgagcaaacagggtgggttggtcaccctgtgatgcataccagataaacagaaactgtatttacttcaaacatgcctgcttctagtcccacatacatgcacaccagaccatacgtttcccacatacatgtcaggtcatagatttttccatttttgtatagaagatatggcaaccctggtacatccagggaacccagaaaattttctcccatttctgattatccaagaaagaattaaggccttgataatagaaaatagcttactaccttattctctttctttgtgttctaagaattctctgcctgccagaatattttggagctctcttctcttgttcttgaaagtgtagtttttgacataatgtagatggggtacaagtgttggctaattaagttttgacacatcaccatattctgtgaggtggctacagcatgcttcatgtaggaggggaaaaaattagaaagagtataatcaggtttgcattacttctaacataggcaccctgatgccatctgctaccctcagcagaggatgcttcaggttgggatctaatgttttactatgaacactgtggatatgattgcagttttctctccattagtgtttgcctggctcattgggcaaagaggaacagtccaacattacactccatatataaactgagaacaggaagattaccatctactatatgcagggctgtgaaggaggaaaaggaagcggcagtgtggtaagaaatagcctatcagattattacaataaaggatataagcaatattaagtaagccacttccaatcagcacctgcaaactctcctttgaatagccaagccttggaggaaatacaaaatttctcatgttctagtagagggctgtaaagaaactcacccttgaatcagaagaaactcaccctagatcacatgcttcttacaccactaactatcctttgccatatttatcacttctgatttaatgtacgtctgtataatcatttggtcaatcttaagtttcccactagatgataatccttgaggataaatatcatgtgtctgtattaactgtgcatccccggaattcaacacaaagcatggcaacaagaaggcagtttttatttgttgaatgaatgagtcaatgaatgatgagcagcgtgtccctcttctgagagccacgacacttcattatgtctccttcacgttactgattccattgtgttatacttctagatttgattaactgcttccccactataagctacccgaagacaagcatcactgaatgcctaacactttcatagttctctgcatgcaatcaatgagtgttgcatgaatggcagagtaaaaggtgggatacaactggtattcctttgattttgctgagagttgtagtaaactgaatttacagcagacattacacagaatcttcatccataaatatcttagatagctgatatattgataggcttgtctttcctgccaagaggaatcagggctcccagataagctgttgtcatggaagaaagcactgagttaagagttaagattgtgttctgtgttcaggtttttactagctcattgtgtggccttggcaggtaactatgctcactgcccctcattttctgtaacatgggcattgataatgcctggtgtcctagtctctcagggctcttgtaaggcacaaatggggaaaaaaagataaaattaaatttactgagaaaagcataaatcatcatgacacctgaggtgacttatttctttacattatcactcatcagagacatctttctatctctgagcaatctataaccatgtttctcttttgctgaattctgctatggtgcctccaacagagaatggtaggaaatacatttttacctgatgaatagcaaaatctaacctaggttttctcgaggccccaaaagatcctttgagaaaaaacattgcctagtcatctccagaaatgaaattgcacatcgtctgtttattttaaatacattttcttgtattttccccttgtaacaagggcttataagagaaaaataagacagaaaagatgaaaggaaaaactacacatagttttacctttgagaaccagcagctattagtactatactgtatttctttccaggtttttcagtaagttgttttcccttataaaagataaaattttctgtcttgctttttccatttctccactttattttaaactcttggtaacattatcttatactaactttataacttagctttgtaagattgttgtgaggacaaaatgagagggtgaatctgttcctaatgatttctaatgaggaatcaataaatgttagctgctgctatcatcaacaacaacattgtcatcattattaaaattaccatggtgtacctaatgttttcttttgagatggagtctcactctgtcacccagactagagtgcagtggcgcaatctcagctccagactgagagtcctttaaattaaaaaattcagactagtaccccatccctgccacaccaccaccactgccagtgcaagtacatgcaggaacactgacaccctactcccactggtacctttctttagccaacacgtgtaccccatgatgctgctgcagttgctggcatgtgtgagtgagcacagatcccatggccactgccccaacaaaacactttggctggcaccccctattggagtattgtggctagggaatacctcagcccctcttgtacagcagctttctaacctcaagggaccagagaacaaagctgggggctgggtaccaggcccccagagttagagcatacagcccagaaatactaagctgagcctttgccccctaaaatattccagaaatgaagccagttgactgaacccactttataccgcaatcaaacacccacaggcatcaaagggaaaaaaaagcaatgaaatccatccaaaggacagtaacatcaaatataaaaaggaacatcagyccatacagataagaaagaaccaggataagaactctggcaaatcaaaaagccaagatgtcttcttagctccaaacaactgcactggttctccagcagtggtttttaaccaggctgaaatggccgaaatgacagacattaaattcagaatatggataagaataaagatcattgagatacaggagaaagttgagacccaatccaaggaatctaaggaatataacaaaatgattcaggagctgaaagacaaaatgaatattttaagaaataatcaaattgatctgatagagctgaaaaatgacttcgagaattttataatacaattgcaagtattaacagcagaattgaccaagctgaggaaagaattgcagagctcgaacactgcttttccaaaataacttagacaaaaataaagaaaaaaatgaacaaaaccaccaagggatatagaattacgtaaagaaataaaatctgctacttactggcatccctgaaagagagagcgagaaggcaaggaacttggaaaatatacttgaagatatggttcatgaaaatttctccaaccttgttaggccaacattcaaatttgagaaatacagagaacctctgtgagatactatacaagatgaccatccccaagacaaatagtcatctgattctccaaggttgaaatgaaagaaacaaatgttaaagtaagctagagagaaggggcaggtcacctacaaagagaaccccatcaggctaacagtggctctgtcagcaagaaccctagcccagaagagattgggggcctatattcagcattcttaaagacaggaaattctaaccaagaatttgatatcctgccaaactaagcttcataagcaaaggaaacataagaatctttttagacaagtaaatgctaagggaatttgttacttccagacctgccttataagaggtccttaagggaatgctaaatatggaaaggaaagaccattatgggccaccacaggaacacacaaatgtgtagaatattgacactataaagccactatacaatcaagtctgcataacaactagctagtgacacaaagccaggattaaatctacacatatcaaaattgaatgtaaacaggctaaatgttccaattaaaaggcacagagcggcaagttggataaagaagtaaaacccaactatatgctatcttcaagagacccatctcacatgcagtgacacccatagtctcaaagtaaagggatgtagaaaaatctaccaagcaaatggaaaacaaatcaggagttgatattaatttcagacaaagtagactttaaaccaacaacaatcaaaaaatacaaagaagggcattatataatggctaagggttgaattcaacaagaagacctaacctgaatatatatgcacccaacatagaagcacccagattcataaaacaagttcttagagacctaaaagagacttagattaccatacaacaatagtaggagacttcaacatgccactgacagtattagacagatcgttgaggcagaaaactaacaaatatgtttgggacctgagctagacacttgaccaaatgggcataatagagacctacagaacactccacccaaaaacaacagtatatacatttttctcatctacacatggcactctaaaatcaaccacaaaattgacattaaaatatcatcatcaaattcaaaaaaatatatgttaccaaccacactctcataccccagtgcaatcaaataagaatcaatactaagaagattacataaaaccatacaattacatggaagttaaacaacctgctcctgaatgaatgacttttgttaaacaacaaaatcaaggtaaaaaattctttgaaaattttctttgaactaacgagaacaaagatataccataccagaatctctggaatacagctaaagcagttccaacttaagaaaaatattcatagtgctaaatgcccacatcaaaactttagaaaggtctcaaattaacaacctaacatctcaactagaggaacaagaaaaacaagagccagccaaccccaaagctagcagaagacaagaaaaaaacaaaatcagagctaaactaaatgaaattaagatgggaaaaccatacaaaagataaatccaggaggtttttttgaaagaacaaataagattgacagactgctagctagactaataaagaaaaaaaagaagatctaaataaacacaaccagaaatggcaaaggggacgttaccactgaccccacagaaatattaaaaaaaacctcagagactactatgaatacctctatgcacacatactataaaacctagaagaaatggatacatttctggaaatgtacaatctcctaagaatgaaccagaaagaaactgaatacctgaacagaccaagaatgagttctgaaattgaatcaataataaaaagcctatcaaccagacaaagcccaggaccagatgaattcacagccaaattctaccagatgtgttaaagagctggcaccattcctactgaaacttttcctaaaagctgaggagaagggacttgtctctaactcattctgcgaggcaagcatcattctgaccaaacaaacaggaagaggcacaacaaaaaaggaaaacctcaggccactctccttgaagaaaatagatgcaaaaatcgtcaacaaaatactggcaaaccaaacccagcagcacatcaaaaaactaattcatcatgataaagtaggttttacccctgggatgcaagtttggttcaacataggcaaatcaataaatgttatttatcacataagcagaactaaaaaactacatgatcatctcaatagattcagaaaaggctttcaataaaattcaacattttaaaaaaacaacaaaccagacactgwgaaaacatatkttaaaataataagagccacttatgacaaacccacagccaacatcgtactgaaaatgcaaaagctggaagaattccccttgagaagcagaacaagacaaggatgtccagcctcaccacttctattcaacatagtactggaagtcccagctagagcaatcaggaatgagaaagaaagaaaagacacccaaataggaagagcataagtccaactatctctgtttgcagacaatatgattctatacctagaaaaccccatagactttgcccaaaagctcctagatctgataaacaacttcagcagagtttcatgatacaaaatcaatgtacaaaaatcaatagcatttctatacatcaataacatccaagctgacagtcaaatctagaacatgatcttattcacaacagccacaaaaaagaataaaatacctaggaatacagctaaccagggaggtaaaagatctctacaatgagaattacaaaacacttctcaaggaaatcagagatgacaaaaacaaatgggaacacattatatgctcatgtatagatgaatccatcttgttaaaatggccataatgcccagagcaatttatagattcaatgctactcctgtcaaattaccaatgacattcttcccagaattagaaaaaaccattttaaaattaatatgtaaccaataaagagcctgaatatgcaaagcaatcacaaccaaaaagaacaaagctgcaggcattacattacctgacttcaaattatactacaaggctacagtaaccaaaacagcatggtgcaagtacaaaaacaggcacacagaacaatggaacagaatagacagatcaaaataaagcttcacacctacaaccatctgatctcctacaaagttgagaaaaacaatggagaaaggactctctattcaataaatggtgttgggataactggctagccatatgcagaagattgaaactgggcccctcacttatatacaaaaatcaaatcaattcaaggtggattaaagacttaaatgtaaaacctaaaaccacaaaaaccctagaagataacctacaaaataccattctggacataggctctggcaaaaatttcatgatgaaaacactaaaagtaattgcaacagcaacaaaattgacaagtcagatataattaaactaaagggcttctaaacagcaaaagaaactatcaacagagtaaacagagaacctacagaataggagaaaatatttgcaaactatgcatctgacaaaggtctaattcccagcatctacaagcaacttaaacaaattaaaaaaaaaatttaaaagtgggcaaaggacatggacagacacttttcaaaagaagacatacacatggccaacaagcatgtgaaaaaatgctcaacatcactaatcattagagaaatgcaaatcaaaaccacaatgagataccacctcatatcagtcagaatggctattattaaaaagtcaaaaagtaacagatgctggggaggttacagagaaaagggaatgcttatacactgctggtgggagtgtaaattagttcagccactgtggaaacagtttgacagtttctcagagaacttaaaacagaactaccatttgacccagcaatcccattgttgggtatataaccaaagatatataaattgtgctgccataaagacacttgcatgcgtatcttcatcacagcactgttcacaatagcaaagacatggaatcaacctaaatgtccatcaacattagactggagaaagaaaatgtggtacttatacaccttggttcacagccataaaaggaatgagatcatgtcctttgcagtaacatggatagagctgaactcattatcctcagtaaactaattcaggcatagaaaacgaaataccacatgttttcactgatgagtgacagctaaacattgagcatatgtggacacaaagaagggaacaacagacactggggcctccttgagggtagagggggacaggaagatgaggactggaaaactacctgccgggtactatgcttattacctggctgattaaataatttgtacaccaaactcccatgacatgcaatttacctatataccaaacctgcacatgtacccctgaacccaatataaaagcttagaataaataaataaaaatctgtgcattttattgtatgcaaataataccttgatgaagttgatttttttaaaaaaataacatggaacattgcctatttctagaatagtttagaaaaattcaactgatattcattatattgtctcatatattcttattttatgtttttattctttaatttcttattttttatttacagtttacctyatagtagtttgaaattttcaccttacatttttgttctgctagtgaacatccttaaacttgccgaaatcagaaattgttttcctgtccaaataaaaataaagcagtgtctacaacaatctcgcttaaacaaaatacaggttgtatcattggtattttataacttccctttgtttcttccttactacctctttcatattgttaaaaattatcttgaattttggttccagattgttaattttttactttgtgcctcttctgttttatgactacctacttaacaattccattaaatttcactgccatattttcaaccattacttagtattaactataagttttactgatatcattgctcattttattggtatgttatgtatttctgtttttcaactttatcttgctgaagtacaacctgaagtwttttgttgttgctttgttttcagaaaaggttatgtgggtggtaagccttctatgttcttgtatgtctaaaaatgtcattcccctctgccccatactttaatgataggacttgagcttgaaaacgtacttctttaactttttacaggcattggtctgttgttttcctgttttctgtattgtaaatgagaagtttgatgctagcaaataatgtaattgtcttcagaatcccatgtttctgaacttgacttttaattccatttctaccacttactaactgtagaactgcataacctcagggatcctctttttccatatccgcatgcaagtagataagagtgtggtatagggtcctggtgtggtgaagattaaagtaaaatacttagctcaaataaataatgggctcagtgatgagaataataattcatttataccaaaaaatgtattttttaatgggagcttgtaagatttttctttatccttagggattccaatttttttacaattttgccataagggactcagttggccttttcttctctgaaaactcaagtccctttccagcttcaagtcagtctttctattatttatttgattacatcataccctccatctgtatctctttctttccttgtgatttctcactacagagttattgggtctattgagtctgttctccatgtgtattagtttcctattgctgctgtaacaaagtaccacaaacttagtgactacaaacaacacaaattcattattttaattttttagaggtcagaatctgaaatggatttcatagggctaaaatcaagatgtcaacagggtggcattcctttggaggaataaaattacttatttacatttataaatcaggatctaagaaaatagaattggttcctgaaatgtaattctccttacatgaaaaaaattgtatctccaacaatgggtataaattcttaagacaraagccctggctcctttcagggattggggcactgggaagtcttttctttaggaggtatgacactttatcctttagtagcccattatggtaatcaaagttacttgggagttcagtgctgcaatttttttaatgctagtgcccactctggaaacctctcacagatgattcaccagtttattcaggaagctattctttcagctttgcttgggggacaaacgtggggtcagccttttgaacgggacagctctttcaggtctctttattcagtcatccctcacctttctctgccccctgatcttggagtcccccagaattttgctgagaaagcctcttctttcttccattttgtgttatgaattgtttagctttttgatattctcagtcaatgtgttgctatctgccttacagctttcagaaattcctcagtattcagatctgccaaacacaagctccctatacttttctagtggtgttataattttgtcctctttgtgaatatcttatgtcatttaatgggatatgaggttggagacatgcatagtcaactatcttgaattctaaattttttattgtttattctattgccatatatgtgtttttgtaaattgtaacaaatatttttcaaaaatgtatacgtgaatatatagagacaatagataagttgataaaaattttgatctattgacctcacaaatacaggatctctgattttgtctgaataaccatgttgtttactgggtcaattgcttgtttggcaagcatatctatgcctgggctatgttattcactggagttacttttaaaaaataagccttttaattcttcatggtgtctattgttcgtacaattcaattttgcactttagtttcattctgaaaatttagcatacattatagattatcagtttatctcactcagtagttggctagagaagtctgaaggtcagagaattcatttccatggaccttagcttttcctatttctaaattctttaccagaaaccagactctctttggtagtttgactactttttatccccataaacactgaacactgtatttaagtcaaagagacaaaatccctcttgtatagtccaagcactaattttacagtcatcactcaaaataccccagtagaaatgcttccctycccgtatcccctgccatggttgctatgtttctgcatctggaaagattgccctttactataaccctggcttcggacttagagcgtggatttttccaacatccgtacagacaatttccacccacgcagaaccagtgtggtttcatgttactctcaatccttcatggtggctttatttttattttttcrttaggatatcacatatttgtttatgtattttgattatagtctttttatctgttagcctgtaacttgatattatgcaacttataaaamcaatamcaataatactgatgatgacaagaataataataaacatcacttattragcataaagtaggtaccaagtgcttttataaactatcaattttaagtgtttttaactggaagtaatgaaaaataaagccatagtgtctaatacaagtagtttatttttgacacataatgagaagtttgaggatttgcagctgctagcgttgttccagttgttcaatgttattcataatgaagcctctagtactcacgtggtcttttccccaytgtgctaaaatgactgcatcaactccagccatcatgcccaccagcaggaagaaaggagtataaaatggaggaacctgaatcagaaaagtaaaaatatcattgagactatagctgatcccacctatgtctgattggccagaatagtaacacaccaactgccttagccggaattggctagggagaataaatttggaacggaggctgggccaactaacccatattggccatatgtttgccataacaagattatctcattttatacatttctgccattgttattcctctaaggatattgaaagccagagaatttmtgtgactcatgcaaaatcacaccattggcaagagaaatggctggacttgaacttatctctacctttctctgaattctcattatttccttttattatactatctcccaggattgtttataaaacaacagtatacataattaaagcagaattgaaggaataaatgaattaatggcttcctagcattgttgtttatgcagatggctctatataagagatagttctgttaaagtccttactgagtagctttgagagataggtggaaaaaggctgggaacaactagcctggattcaaatcccagttccaccacttactcatacaggaccatgaatccggcacttcatgtctctgcaccttgagttctcatctttctctttgtaactattctctccaagtccagccatgcattacagccaaattaatcatcaagcagtgttttattcccctgctcaaaaaccataatagttctctggcgaatgccatgaactagctactcaaaagggactcrtagttaccttttccctgggctttctttgccaaagactcagaaaatagaaaatactcaatttctcagccccccatgtaggtagggatggcatgatacattcctcaccggtgagatgtaggtgacagtcttgggaggggattggccctccctttacccttaaaccttcttcctgcttatagtgcagacatggggctggaagaggagcagtcatattcccatcgtgagagtgaaagctacctgtgcagaatgacagggcggggcaaaaggaaagagcctaagtcttccatggcctcctgagccaccataccaaccctcacctgcctgcctcctgacttcttcttccatagagtaaaccaactgctttctcatgtaaaccactgtctatttttccatcaattgcagctggctgcattcttacgtgataacactttccaagtaaaacgtaaaccctgtacatcaatcttgaagatgctctagagtctggtctcaaccttctttccagacttttcttccacttcttccattcacaaactctattattcatccaaaccaaatcgctaactattaccacctctgtttcaaggccaggctgaagtctgacttccccattcaacaggttttcctcatgttgcctgagtggtgctatttctcgttccttagaacttcagtcttctttaatacttagcactttctctcttgaattacagttatttgggtatctgtctcatctctccctttgtgcattactaaaagccctattattcactaccaacaacccctcccaatcacacacaccacctcagtccccacatggcaccttggcccggtggatccttagtgtctccgtggtaatgaatgcgtagtagtagatgtgattgttttgggctatttcgttttgttttaaataccactgataatcattggaatctcttatttgtctctactgccttttgcatctttttcaatcaaaattattttcttagatctggaattccatctttcctgaactattgttgacctacttataaaaatctggaaaggaggagatatggccttgtttgcagtgcttggttcataagactctttccgggctgtctgctgtgcactgagcagaaacaagtttttaattctctccttgacaggcaggcagactggtgtgttctcctggcataactgtcaactagctccaaattcagtaacctctggataagtagaataaaggcagcttttgcttttatgaattcagtcctctacagagcctagcacagtgcactatatatactagtgacccaataaatattttttacgggtttgaaactatggtttgagtccaaattttcaaacaggcttactttgctttaatatactgttcactcattttttatttatgtgtattattcataccctgactacttctcaaagagatgtgtggtaactaaaagctacaggtacaccataactattaaatcattcaagcgaggtttaaaaggcaaaaaaaacaaacaaacaacaaaatagcccagtagtagggagacctagggtagggtcttaaagttcagctcctttgttccttccaacaaaattatgggtttggtattttttacaaatgaggaagccaaggatcaaaaatattgagcaaatggcaacaagtcttaaactcgagaatttacgaacccacaactgaagcccaacatctgcagatgtcatggtctgaagtcttcactcagtttcatgctgtgatggaagaagattctacacaccctgcctactctatccccatgaatgacctgaaacacagacaagagagattattaagtaaaaatgcgttacaacaaccagaagttaaccgaactgttctattctgtgaagttccttgcaaaacactaagccattggcacattaatggaatgtcaggagagaagtgcccctaaaatttatccggtgttgctacccccttttcttcaactgaagaaaactaagtgaattgagctgcctaagataatcaatgtaaagggttcatcggtgccaacctacttccccaggactgcttgcaaactgggagacaccaactctttttctgtctagggattgaggtcagaaagtctcaaagcatgatgtctccagtgggtgttcagctaatgaaaaagctttcacaaattctttagcaaaaacacttttggtcatttgttttgttacctttgatggaaaccttgttttcatacatgcaggtgaaacttccattagaaatttgtagttaaatggtaagtgatgctactattgatctgacaaagatagaaatgctcctatgggtaggaaagtttaattataatgtaggcaagcctagcagctagtctccaaaggtggcccccaatgaaccatgcttcccagtagtgatgtccttgtgtactcaagtacttgtgcacttgattcttttttattttattttgttttgtttggtttggtttggtttggttttattttatttttgagacagggcctcactgtcatctaggctggagcacagtggcgcaatcatggttcactgcagcctcgacctcccaggtttgggtgatcctcccacctcagcctcctggttagctgggactatgggtgttcaccccaacacctagctaatttttttgtatttttcgtagagacaggatttcaccacattgcccaggctagtgttgagctcctgggctcaagcaatctgccttctccagcctcccaaagtgttaggatgacatgcatgagccaccatacctgcccacctgcttgattcttgactagccctgtataagtaacagaatgtggtagaggtgacactgcatgacttccacatctaggtcataagaagccttgcaatctccacctgggtctcttgaaatgcccacttgtgggactctccctcacagaattcagccaccatgcccaagaagacaaagcctagagaggccatgtgttgttattctgattggcagcaccagctgagctcccggccaacttctaagagcaactgtcagccttgaaagtgagccatcttagacagccatcccagagaaccttcacataatgtatctccagacgacaaccatattaaagatccccaagtgagagtcacccagctgatcccagtcaatccatggaaccatgagttataataataaataactattttaagccactgaattttgaagatgatttattatgtagcaataggtaatgggaacagcagaacacactacaaagattatttttctctccagtttccacaaatctcagtggcaaagcattatcagtatctaccaagatctagaagacggtcaaattggaatttatttaaactcctctcccatcctaccagagattatgtcatttccaactaagttatttatttcattcctaagcaagagacacaagggatagaaggatcttgaaagaggaatgcaatttaaaaatatctattgagataggtattttgacatttgaaggaagaaaagacaatttaggatgctttaagagctttccaatgtttaccttcaaattatttcattctcagctatagaaagtaatccttattctactatttagttaccatttttatttagtttggagaaatctacaatggcatggtgtaccgcttaaagattttaawgtaaatgttcagtaaaagatgatatttgaaagtagcttattttgtctggaaaactctgaaccaagctaattttcttctatttgtgtatcttttctttttttctatttctttttccttcctccttttgttacttcctctctcccttccttctttcctttcttctccttttttttaaaaatcaataccaccttctgattatctcttactggagacaaggaaaagaaatctagaagatgtcatatttcagggactyaccaagtttcaactatcatgtgaagtgatcacacacagttttttttgttttgttttgtttttgtttttgttttcttgagatggagtctcattctgtctcccagactggagtgcagtggcgcaatctcggcttactgcaacctctgcctcctgggttcaagcaattctttgcctcagcctactgagtagctgggattacaggcacctgccaccacacccgactaattttttttcttttttttttttctttttttttttgtatttttagtagagaaggggtttaggggtttcaccatcttggccaggctggtcttgaactgctgacctcatgatccacctgccttggcctcccaaagtgctgggattacaagctagcctcccaaagtgctggggttacaagtgtgagccactgcgcccagccaacacacacttttattttattttatcttcacaataagccagccaagtggtgatgttgttcgcattgtgcagatgtggaaactgaggctgaggtaaataacttacccagattcgctgaaccaaaagtaattggcagagcaaggatcccaaccatgttatttgttagtccaaagactttgctgttcccataatataactctgtatctgaagcctacatttagttctgggttgctgaaaagtatactgaatggctgcccagagtttctactcatctcagagtccccgcctgccttcaggtttgattgctaacaagctctcaagaactgctgctctcctccattctgtgtttcagccttgtgggcctgcttgcctcagcctagaggcttctttctgcgtgtctattctttaagagcagttctattggagggggtatttaagaagaccctaacttgaagacaaatctatacaaagacttgtgggtttttttttttcatttttttcctttccagattttcaagaataagattgtattagccgaagttctctactgaaacagacttataggatatatatatgaggaggtttattataggaattggtttacattattagggatgccaagaattttcattatctgctatatgcaagctggagaacctggaaagacagtggtgtgattcagtcccaagtccaaaggcatgagaatagagcagggtgcacagggggagctgatggcataagtaaggcgtgagaatggagcagggtgcacacggggagctaatggcataagtccaggttctagtttgaaggcccaagaacaagaagtaccaaaatcccagggtgagagaagatggatatccaagctcaaacagagaacaaattcactcttcctttgcctttttgttctatttgagctttcaacagattggataattctggcccattctgtgaggacaatattctttactagttctactgattcaaatgctaatctcttccagaaacacctacacagacacccaaaaataatgttttacctgttatctgggcatccgttagtgcagtcatgttgacacataaaattaaccaacacaatggctgaccatgataaatcatatacatggatttagggatggatttccttaatgtaggaatccttaaatattagtattctcatattttcctgggagcttattgccagtgcaaattctagtacactactgcaaagatctgattccagggcatcttagatgagacccaggaattaggttttttaaaagcattcaagttattctaacagaatgactctaagattttgtagaacactctttaaagataagatcaattgcacttttcaattacattgtgggagggaattgttactccaggaagtttttatagttggaaggtgcagtttttatagccactccttctcatctatatctaagactacactgccacattcacccacaatgctcaaaatacctctaaaaacagctctaagggatggtctttagaaaataatgcaggtggctgtgggaggattctgcccttcacttactggatgggcattagctattagacagcttaagtccagttttttgtcctcctgagtagtctattttgtgttctcctttgctaatctctctgcactctctgaccatgactaaggccttttctcgaaggcttttgtttattgtaacttccaaaatgccttagttagaaacctcatctttcccacctacttattggctaactatgtagtacatatatcctggggcccagtggccaaaattatatttgctgttacttcaaagcttaagaaggcaaatctaccctacttctttcatttggtcaacaggtgtttagcatgcagctgttacagtccaagcactggatagatgctgggggttggactgaaggaaaaatgaagagataaggaaggcattggcccctgtctgaaagatctcccagttgaatggagaagatttgtgttgtcatgattctacaccaatgcactcatgtgctaagatgataaaatttctagtgagaaaaataataactaactgaaagggacccagaaaaagaggttgttaactgttcatatggaaggtttcagagtgagaactgagctggtcttaggagaatgtgtaagattttaacagagaaatatgtgttgtagaggaaaagaggagtagatgggggtgaaggggagagaaagagcaaataaggagagttgtgaacgtgtttgagtaagatccaggagttcaccttagtagaaacaggagatactgagggaagtgatgaaagctaagggtgaaaacttcagtgaggcccagtttgtctaacagcatgaatgctgtatccattgtttggaccttcgtcctcttggtcatgaggagctagcagagggatttagtcattcaacaagtctttatgggttgcatcccacccaggtatagcagtgaaaaaaaaatcagacaaaactctgggctttcttagagcttgcattcttgtataaagagaaagacaaaaaatgaagtaaaaatatgttgtatgtcatatggtgctaggggttgaattgtctctcccaataatatatgttgaacccctaatccctgatacttgtgaatgtgatttcatttggaaatagtctgcagatacagtcgaactaagatgaggtcatactggattagggtgggcactaatttcaatgactgatatcctcatagagaaagggcatgtgaagatacaagaatacagacaaataaggaagaaagccaggtgatgatggaggaaagggattggaatgatgtgtctacaaacaaaggaactcctaggattgctggtgactaccataagctaggacagaggcacagcacagattctccctcagaacctccagaaagaaccaaccatgccagcaccttgatttcacagttcatggggcaatacttttctgtcgtgctaagcctcccagtttgcgctaagcctcccagtttgtgctaatttgtaacacagcactaggacactaatcattttgtactaagtgctatgaagaagaaaatgctgaaaaggttcggaaatacagagagggtaggagaagctgtgtgctattttaaataccatagtcatggaaagcctcaatgagaatagaacataaagtcaaagacctggatgagttaaatttgcaagccattgggtgtttgcaggggagaatagcccaagcagggagaagagcagatgcaaagatctcaagacaacccgttctagagaaagcttggaggctggagagggagagtggaggagtagagggcaatgaggtgagagggattgcaaggattttgctttcaatttgagtacaatgaggaacttatgtagggctgcgagcaaagtggccatctgttttagagttttacagcatcactctgtgttgaaaattactgaaggttctcaaagactgagtccaggtgtccagtgaaaaggccattacaacaatccagggaaagggtggctgtgtcttgacccaaggaggcaacagaagagctagtgagaagtattcagaatctggatataatttgaaggtagagtcaacaaattttgctgataggttaaatatggaatgcaaagaaaaaagaagggtcaaggatgactacaagggtttctcttgagcatgaagggattgaagttatcctttatcattttgcagaaaaatataagaaaagcagatttgggagagaataccatgagatgagccagttttgagtatgccaagtttgacatatttgtcaaacatccaagtggagaccccaaataggaggtagagtgtataaacctagaatcctggacagggttaagctaaaagaaaaattttgaggtgtatttaacatagatgatatttaaagccatggctaatgaaatcatgttagacaaaaggcttaaggactgagccctggagcacctaacattaagatggggaggagctgaggtggaatcaggaagggaacttaagatggagctgccagggagggagctgggaaactggaagagtgtggtatcctggaagaygaaagaagaaagggttctcaggcagaaggagctgttcatgggtcaagtatggtaaagactgaaaatgaccacggagtcaacaacttggaggccattcattagtggccttaacaagagcagtagaagtgagtgggatgggggatcattagcatatattcatgagaaaatgggaggaaaggatttacaaatgaatatggataactcttgaggacttttaatgtaaaaagctcaaagaaatggagtaataaaagcacaagtgggaagagtgatcaggaggggattttttttaagttgggaagaataacagaacattgagtatacacagagaagaatgatccaacagaaaacgaaaaattagaagagagaaagaaaatttattgtattatttttaagttgatttgcatgagtgtttatgtatgtgtgtgtatgtccaagtttgttaaccctgtcaaaataaaatcaaaccacagtttactccaaagtgctaaggagtaaatgtgactgacagtagttacttagtttcactcccattacttcctgccttcccaaaaggagatgacccaccactaatagtttagtgtgaattcttctagacctgcactgtacacataaaatctatcatacaaacaaaattttccaccagtaccttacccaagatgtacccrgccaggattatatctgttgggagcacaacttttttcaagagagaagtgccaaactattactctattctgagaaaggagaacaaatagcaacttctgacattttaaaaagaaaaccttcctggacctctttgtaggctccctakagagggaaggaggatggcaaggttaggtctgtaagctgacaaattccagtcttgactcggtgctctggctggcagagacccgtgaagttgtttgtgtaggaacaagagagctgagcacagagagccacactcacagctgaactcagcccaaaagccatagggagcatcaccctatgagtaccaagtacttgacatcctaaatcaggcggcattatcacagtcaagtgttaccatcatagacttgactatgccaggtcgatgtagtcaggtgatacctggagaaagccagccccatttagttccatcttttgaatctggaagatggattgccatcctcccccaacacccatacacacacacaatttacaattggcattaatgaggtgctgaggttttgggacaattctggggataggcaatctcaagtgggagatcctggattttcttgtactaaggcttatgggaattcaaatgattaactgggaaaaatgaaaaaggatatgataatataacacgataattttatgaaacagtttttcatcaattacttatattttgtatatataaatagctatcttttataaaatatttttataaacacatatatacatagcgaatactgtacatgttatatcattttgcaacttttctttctttttagccaacagcataacatacgcatctattttaaagtcaggccgtgtaactctattcttttcttttctttttttttttttttgttgccactgcgaagttttccacaatattcaactgtgggctattgatgaaccattagcattcctccacttttttactattacaaatcatatagcttctaacattttgcgcatgtgtctttatgcatgtgagcaagcattccaataggatatgtgcctagaagtgaaattgccaaaccaaaaactcactaacttgtagtttagatgggttctgcctatttgtcttctccaaagctgttctcctgtcattaacagtgaaagatgttccgttcctacccacctcccacacagctttgccaaacctggatattaccagtctttataatttttgacaacttaatatgggaaaaatgccctctcattattgactgaatttgtgtctccttgttagtgaggttcatcaccttttcatatgtttgccttttgtatttgtttgtaaattgcctatacatatccccgttctttttttctatcagataggctgtcttttttatattgatttttatgtttttatactttatgaatattaaccattcttatgttttaggtgttgcaaattttttcttttttatcatttgtcttttgaatgtgtttatagtgacttttgctggtgtaccaaagcttccatttttaaaatacaaaatacatgaatctttgtgaatcctgggtttcgtcctttattgataaatccttctttagcataagattataaaaacattatgctattaatttaatcattatggttttttatatccgtaatctatctcaaaattattttgagttcattgtatgataaaaggataaaacttttttttttttttttttttcttgagacggagtctcgctctgtcgcccaggctggagtgcagtggcgtgatctcggctcatttcaagctccgcctcccaggttcacgccattcttctgcctcagcctcccgagtagctgggactacaggcgccagccaccatgcctggctaattttttttttaatttttagtagagacagggtttcaccgtattagccaggatggtctcgatctcctgacctcatgatccgcctgtctcggcctcccaaagtgctgggattacaggcgtgagccaccgcgcccggccgataaaacttttttctaattactcaatatattaaataaattgtctaatcaccactaatttgaaatacaactacatttctacatatatttgtagaaataagttctgtgctccctcttttagtttctttcttcatctatcaatgcactatgaacattggtttttttcatgcttccacgtaagtctttcattacttatttttttttattactgaaacttaccagatatgccaataaataagatttcctataggagattggcagggagtcaacagttaagttgggaaggtattaaaaatgtgaggtgcagtgagcccaacagattagaaaataattgccacggaaaagacattttgtggcagggcacaatgtctcacacctatactcccagcactttgaaaggstgaggcaggaggatcgcttgagcccaggagttcaagacaagcctgggcaacatggcaagacaccatctctacaaaagatacaaaaattagctgggtgcattggcacatgccgtcccatctacttgttaggctgaggaggaaggatcacttgagccctggaaatggggttgcagtgaggcaagatcatgccactgcactccagcctgggtgacagagcaagaccctgcctcaaaaaaaaagaaaaaaaaatatttttttgctgacagttcccaagaggaaggggcatgccaatctactcagtaccacacggggacataccagggttggtcaggaggaataaagggaggagggaactatggggaagagccttattacggtttctgctggaagaggtaaggcaaggaaagcagggttaggactggcttattagtttcagcaggctctggggtgattagagcaggtggttagtggcctggagtatgagagccctataaagaagatagttgaggtgtggattctggattggccagtttgcatatgaaaggcatgcttagaggcaaattgttcattatgtctaggaattggctaacccttggaggggcacttcctcctgagtcacctaggccccagatatcaaagcatacagaaaatagaagacatgattaatacaccttcactcaaggagtgccattggtcagtgaagttcactcacggacacatgtcacttccttttctttttagaagaattctcctccctaatgtggataagaagaatttaataggggactttttgcatttcatttctgctcctcatgctcacagtttctccaggattctgttgggagcaatgacctctctgcagtgagcttttcattggtcagctttgggacactctgttctctggtcctcacttcagccaagcctatcttacttgctctttatcattcagaagtttctcaacgtttctatctactcctgttttctagagttttcgttgatgtaggtctttattttagacctttttgttcatcttaataatattgagaagtctggagttatcaaataagtgtgctcagctccactgtcttgaatggggatcccatagtagatttaatgaagtagaatagagagtagaatctctgggttagatagataatcttgggagcagtaagaaagatgagtagaagaagaaaataattaaaataggacattttaaaggcttatgcagctatttgtagtatttgtctccccagtaattccaattctggtagtttatcctaaagaaatagagctacacatgaaaaaattcactgtaacaccatgttcagtggacaataattagaaaccacctgaaatatctgacagtagataaatggctacacaagtgtgataaccaactgataagaaactattcagttgtttaagttccattttgaataaattgaatcatggggaaattctcatgttataatggaaaataaaaaggaaagtcacaaagttatatagtatatgtttttatttaaaaatgaaaacaataatctaaaatgccaaaagtggttattttgagatttgggaattatagaattttattgttatatttgttcattatatatatatatacacaaacacacatacacacatacacacacacacacacacacacacacacccatatatatatatatatatatatatatatatatatatatatatatatatatatgaacatgaaaaaattgaaaaagagttccttggaagagcaccctgtttgtcagtgaatgaatagttataagcttgaaaaacatttctttggctcatattatgtattaaaatcctggaaaatgtagaagattcctcaatacatgcaataatctgattgagtaattaaaatgaatacctggatcacagaagataatggatcaaagatttttataggtggaagcccaactcacacaatttgcagatatgaaccctggtgcctacagagttgagttctcttcctcaggtctgtctgccagttagatcagagccagggatacatttcaatcttgaacaataatgtgaaaaatatcctatgacagattgtgattctgccaggtaggtaatagaaactcttcacatctctaaatagctggggtaattgcaggagtttttctgcgtcttgccaagtttcttagggtcatacttcctacatttctacaactaatgcaggggcttctgaacttgtctacttatcagaattatatggagaactttaaaaaatatgttaagtcttaggcctcagtgtggttaaatcttagaaccagaattcccaactttctggaggtaattctgatgcactatcagctttgtgaatcattgtgtttttttcttttttcctttttcttttttttttttttttttttttttgagacggagtcatgctctgtcacccaggctggagtgcagtggtgcgatcttggctcactgtaacctccgccttctgggttcaagcaattctcctgcctcagcctcccgagtagctgggactacatacgtgtgccaccatgcctggctaattttttgtatttttagtagagttggggtttcaccatgttagccaggatggtctcaatctcctgaccttgtgatccgtctgcctcggcctcccaaagtgctgggattacaggtgtgagtcaccacacccagccgagaatcactgtgtttttatacctctttacctctctttatattcttaggaaatggacaaatagacaaaaaatgtgaaaaagttgctggttaatgaaagaccttctatacactgacctatagaagacaggttttaaaatgacttagtaatactaattgtcatttagagatgtttgcaccaatacagtgatgctacccccttgaaccttagatggtgtaccagcacacctgatgatcaggtggtcaatgaaatgggtacttaacttcatatctttgaatttgatttattgccaaggtgcattgaagaagctaaagtagttctgctaatgcattacagagagtaaaagctgtgagtttatcaaagagagaatcatcatgatgcgggatggtcagggaagagtaaatagttataatagtagcaatcattcactctgaactccttttgagccaagaattgtgttaaatgcattacccacatttgtcacataaatgctcacaatgagtctatcacatagtaatttgatttagtcaaaataagctagcaaacaatctcaaaataccagtggatttaaacaaagttttatttctcacacatacctcatgtccatttgaggtttggcagggtactctcttccatgtcatttctactcagcaacattggctgatgacatctccaccatctggactgtaggtggttgctaaagcttgggggagggaagatggagcagtgtgcaacagctcctacacatgtccaccatgaagtgacccaccccactttcactctagccaagccaattcatatagtcacatgcaacctaaaaggagcaggaaatgaaactttctcaagtgaggagaatttcagaactagaaatattagtgagctgcatgcactaatatttgccacggtgtcgttcctgattttaaaatcaagggactccctaattacagaatggcaaaaaatttaagaaacctgctaatatcaagtactcacaaagatacagaacaattggagctctcaggcatagctgggggaatgcaaaatggtacagatgccctgaaaaatagcttggcagcttcatttaaagtgaaacatatactaccatatggaccaggatcttgcttatgagtttttactgaagtcttcagtaagtcactgaattcttcactgaagtcttcactgaagtcaattttgccccccaacatttggtaatgtgaggagacattttggttttcacaactggttcagaggctgttacgggtacctaatggatagatccaaggatgctgccaaacatcctgcaatgcacaggacattccccmcaacaaagggttattccactttaaattcaaggtggagacattttgcactaaagaaataaaaactgccaggtgcactgactcatgctgtaatcccagcactctgagaggccaaggcaggaggatcmcttgagctcaggagtttgagaccagcctgggcaacatagagagacctcatctctaccaaaaaaaaaaaaaaaaagatgaaaaaaaagtagctgggtgtggtggcatgcacctgtagtcccagctactcaagaggccgaggtgggaggattgcttgagcctgagaggtccaggctgcagtgagctgagatcatgccactgtactccagcctgggtgacagggtgagaccttgttcaaaaaaaaaaaaaaaaaaaaaaaaacgagagaagaaataaaattttatcttcacataaaacctacacatgaatgtttatagctgcattatctatatcactgacaactggagacaactctcatgtctttccatagttaaacagataaaccatggtccccatgcaatgggatactactcagcaataaaaagaaatgaactattgataaatgcaatagcatatatgaatctcaaaggcattgtgctaagtcaaggaaactgactccaaaaagttttatattattccatttatagaacattctggaaaaaagaaataggaatagataacaatcagcggtctccaggagtaagaagtgtcagagggtggtgaaggggagttaagttaaaagaaactgcttgagggaaatgttgggggtgttggaattgttctgtatcctgattttggcagtggctacaataatccacatgtactaaaactcatttaactatataccccccccaaaaaataaactttagtaatataaataactttttaagttgaaaaaattaaaaataagtaaaaacacaaaagaacagggctgagagacttgtctctgtcccagagattggggtgcagtataaagaatagaacccagattagaatgactgcagaaacagccttcttccccattgcataaagctgcctccacatgaagaaggactgtgagctgtaaacagagcttaaatgacttttaagttcaaaagtatttgtcgttccattgtgttgactcttgaaagtgttaagtgtatcacggtgacttggtaaccttctaataataccatggttctccatcagtctaggaacacagatctagatccaggtcaaaactgcctttctaggctgggcacagtgcctcatacccataatcccagcactttggaaggccagtatgggaggattgcttgaacccaggagttcaagactaacttgggcagtataagagtataagcagctctcctggttcctgggaaatatagggagaccctatctctaaaaaacatttagaaattagctgggggtggtgtcttacacctgtagtcccagctacttgggaggttgaggtgggaggatggcttgagcccaggaggtcaagcctgcagtgaaccatgatcaaaccactccagcctgggcaacaaagaaagaccctaagaaaagaaaagaaaagaaaagaaaagaaaagaaaagaaaaaaaaacagaagaaaaacatcttccttactcactacccctcaccctaccctatacaggatgcccaagggtaagcgtggagacatgtcaacaggaggaaagacccagtttaagttgcaatagccttgggtaaaacagacactctatatgagtaatagaaatagatgctgaatttggtgttagagttatttcaactcatatctacatttcatttttctgtccttcattttgtaataatcttgcagtggttaattctaatagtgggctattgcttgaggtatcagaaacaaaacaaggaagagctgagtatcaatgttttcagtacattttacatgtgtaacaaggttaatataatagaccacgttaataatgaggtcacctggtgctctctcatatgcctttcctggtgcatgtggtcagaggctattctaatcaactctgcccgcctcctgacattttaattactgaaacaattactattgcctgggaaacaaatttgaaaatgacttgaataaaagagcagataaaggagagctgagttttcagtttttgtttttkttttttttttttaataattactccaagagtagatgctcagatgagaaatttttaatggaattaataagatgatattaggggttggacaaaacctccactaagaatgggcataaatgaacccaaacctgattcttaactctcaaggaaaatataccacatagtcctggccatgaaagccacagtcttgtaatattgtttggtatccttcaagtatttatatgtacaaaaatggacttagagcattggtctggattcttcaggaagcaaatatatacatttcccctacactctacacaggaagttcataaaacaagtcatgctgattaaaagccatagttaactgggtctttttcttccattgacaaaggagggttgacaagtctgggaagaaaaggaactcagatttattaagaacacacaatagaagccaggcacaatagtaagtgttgcaggtctggtgcactatcctatgtgcttgtgtaatcctcccaaacactgcttatcaatcagggtctagttgcagaacacaaacacgtttttggtcattttaggcagtgaaatgtgtatttacatcattgggtgggctgaagaaaaacactaggctggacactcagagtgactcccagamcaacactgtggaaaccaggagagctgcttctactgccacagtcaaaaggagcagaaccaaaggcccaccccagccagcacaattgcctctcagcacacccatggccagtcatggacactagaattgtgctgcagtgaagcccaacatctccacagccatgcttgccaataaagaaagccaaaaagcaaaaaattggcctctctcttgcatctacatttcaaacaagtacgttgtattggtggaacctaatttgcttatgaatgctagctccaagggagtgtgggaratgtagttttttgcctcccargtcctgtaatactgagatcaggatgatagaacgattgctgagtgccaactacctaatgcactgcactctgtgaaggagtttatgtttttccaattctttataggaaaaataccgaggctcagagaagtgaaataagtttaacaagatggtacaaactgaaaagtagcagtgccagcatttgaacctagttgtctatcctcattgtcatcatttattgggtacttactctgttctgtaccttgttctaagtaccttcaaatattattttatttaatctttaackctgttacataagtattatggtccccactttgcaggtgagggaaaaaaaacaatgcagagacttaaataacttccctcaaatcccacagttagtaaagattagagccagcatgcttagaaactaaactccagcacttctcttcttctcctacagcacattgaactcttgacagtgggtgtttgatcagcaccattgttgatatatatctctcaacactccctgagacaccaacattccatgcatatggagtaagatggtaatcctctgaaagccacttaggtgcttttggctaactggtgtggaaggtttgagggctatttagagttacatacttggtgcagtactggcaagaacctaacaataagctccctggaaataagagtcctaatttgtagcctttaccagtctctgtgatataaattctccaaccatggccaatttcaagctaccaatatggtattaaccagtttgcaaaattcctgaaaatttaacaattggctcttgcaagctagtatgagccagctccagacagctctgtaaatggtctctatttgttcaggacctagtatacccttacaaggagacttgaatcctttctacatttggagttctgacatgtattgagatgtctaaacactggaaatctcttgacagaaggcagatagcagagagatacaaagaggtctctgaagggggaagaacaccgtaggtttgtcataaatctggtgggatggggctgataatttctgaagaaacaatggtttggggtgctactcttgaacttgcttggtctctggcccctgtgtcaactatgagccctacgaaggagagacaaacttttagtgattcaagacactttgctgggagaggcccttatcacaggtaggtgagtaataaagctgaaaaaacactatgactaaggttccaagtcactctgtggaataaaccctattctttgtgctatcaaaaggaaggaaatgtatttccattctagccagagacttatgggagcacaggcactgcagaaattctccatagaaaagaccaagtgtagccactgcctttctgctctctgtctttaacgtgctgtttcttacctgggtatgcttttcccatttctttaccaataaaaaaaatcctattcctcagtcaaaattcaaatgccatcttgtacaggacactgggaccctttcccaaaatctctgcagttgggattagtaattcttcctttggttatattatcttttaaggtacatgtttcattcttsttggcatttgcattagttgcctacacatgagtctytgaaggtacatgatgaactctctcagggtagtggtggtagttcatttgtgtctgtggttctgwccctctggtacatagaaaagggctgtcgcatacacatgctcagtaagtaatgctgacattgcttatatagcaagtagagaagcaactggtattaaagtacactcaaaaaaaaaaagtttaaagaagaaggaagggctggcatggtggctcacacctgtaatcccagcactttgggaggctgaggcaggtggatcacctgaggtcaggagttcaagaccaggctgaccaacatggcgtaaccccatctcaactaaaaatacaaarattacccaggtgtggctgggcrcgatggctcacatctgtaatcccaacactttgggaggccaaggcaggtggatcacctgaggtcaggagttcgtgaccagcctggccaacatggtgaagccccgtctctactaaaaaaaaaaaaaaaaaaaaaaaaaattaggcctggtggtgggcacctgtaatcccagctattcgggaggctgaggcaggagaatcgcttgaacctgggaggcgaaggttgcagtgagctgagatcatgccattgcactccagcctgggcaacaagagcgaaactccatcttaaataaataaataaataaataagcaagccaggcatggttgggcacacctgtagtcccagctactcaggaggctgagacaggagaattgcttgaacccaggaagcagaggttgcagtgagccaagatcatgccactccactccaccctgagtgacagagcaagactctgtctcaaaaaaaaaaaaaaaaaaaaaaaaaagtaaagtgggaagaaagtaaagaaggaaggagggaggggtggaaaaagagaagaaatctctaccattcaatgttttgtctgaagggtgagggtacattttcaccccatgatctgatattaaaaacatgtttttagaggaaagcgaagaatctctttagaacatcttagagctagctgcctgagtcatggcataagaataatcccaccaccccctgtatttcttatttgtaattcatcctttctagggatacacatgttccccacaagaagtgttcaccagtgagattatccttggcaaagccattgatcagagggcaaaggattgtttcagtccctgtgccaatgcttccttgatggcgattgcttccacgaagcaaacaccttaatcactttgttttctctagcatgtcaataagtgctcatatataataaatgtgtgcttacagcatatataatatatatggatgtatgtggtgttttgtattccatgcctgaaagaacagttgatttatttcatagcttttatggactgttttattattctcaacaacatcacatccattctctttgcatgcatattttatagcaccttgatggacttatttgatttgacccagtgttttgatgacagcacagccataggaggttcacattagcttacacaaatcatttgctcaagtcactttagagtgtgatcctgccctcaggtkatttgtggactgccagctctttcatgatgggcaaaatagcatagcatgccctataaagctatggctcaggaaaagctcttggtgattcttggatcaacagggcaatctcctaggaggggctgctaactgtataagtatartcagtcattgacagaattctatcactggctttgattcaatgtgattcttctggctgtcaacatccttataaggagaggctaagacagagtatcataactgtatgtcagattcttgaatcctaaaagttcatgcagcaatagattggccttagtaaatactaattaaagagtggtttgggcaggaaggtctgaggattggctgtgatgactcggacaagcactaaaacttgagaagccctgctttaagaagttcatgatattgccagggatgttaacatgggttctaatagacatctttatacagtgctttaggagcacaaataatgtagtaagaaacaccactttgggtagttgaggacagtcttcctaaaaattgacattcagacattttcttgtcctttgatttttttcctactctggcagacaaactgcttttttatattactattttttgtagagacagggggtttgctctattgcccaggctagtctcaagctcttgacctcaagtgatcctctcccctcagcctcccaaagttctgggatcacaagcatgagccactatacccagcctaaatggctttcactccgtgcctcattctgagtcaaaatggctctgtccagggttctgaaacctgccttctaaatgttcttcatgtgaaatcagttcaaggatctgacagggagactcctgttaagtttactgctgtgttttatgttgtttcctggtgatcccatattaaacagacctgggaggcctcaggagtaaactttcacgtcaggaaactgagtctagaagaggcctagcaactcagcccccagcacaaagtgagttgatggcaggaccaggaagaccagctcttaggctttctgaccttcaagcagctactctttccatgacattggggtcttttcctggtccatttgaaatggtttatgattggatttgtggccataagttagtgttcaaggctgaaattttcataacatcaatagagatgaacttcttaatcttattaatattttcttcttgtatgtgtacccttaatttgtgaaaatagtcctttttctattggagtttgacttttcccccctgataatttatatataaaaattattatgagcatcaaaatctttctatgctgatatattttgaacggctttagaggtgtataaatcttttttaaagtaatacgttttcatcaaaagtaattagcttaacttaaattagacattatcttgattttccattttttatacttgtgtgtgcatgtcaccttttataacatcttttgtaaaaaaaaaaaaacaaaaaaacttttggcttcatagctaacttgaatttctttcttaaaagatttgagaatgatcatgagtgttctatatcaacactcttgggcaagaatcgaggagagctggtgactataaacactgagtggtgtccaacagagctgctcataagtgttatttgtaaaggaaggtcataaggccaagcaggagatgtcagaataccaggtggttagtctgagcagtgctggactagggagagaaaaaaacaggaatcaaatctttcagttagagatgtagctaaatcaaagccacaactctgtggagtttattaaaagggaggccagaagatcaggagacatatcaacaaaagtcaggtggagattggkcagggttggtagtgtaaaataaggtcagttcwgggataaatcttgtratcttaaccactgagtgccttttactggggacttgacacccttatactgggtgaggcaggagacggcacgcttaaagcagtaagcaccttctaagcaataggtcagtttctctcagaagcagtaatacaaacatgcatttataacccatggcagtaaaaataatttgagcattatgagaaggagcggaatagattctggtgctttgtgtaaaaccctttaaattcccatttcattaaaaattcttctctgcagctggtagcagagattaccgtggttcaccatctgtggggattaatgtttacttaaaaagaaagagggagagcgagcagcagataagatgaatgatttccagatacgagagagctaaagtagaatatctttgtgtgtgtgtgtgtgtgtgtgtgtgtgtgtgtgtgtgttacacctgctttatttgaactctgtgatagaattgtttaaagaaaacctaggcttatttatgtttaaagactgaataatgtagaaacagtggatcatcatcaaactgtttagatttacattttatgcagaattcattttgagaggtttttagaatctgttagaaataattaggcatgtttggaactttctttttacatttcccattctgggaagatttttcctgatacttacagattgagttcatgaggcagaactccacattctgtcctgaggggaccagattaccaattccctctaggtctgaatctgatcaattacagacatgcacctcatccgtagactgacttagcttcagtagatcactgactggttgccttccaggaactggaattgctggtgaactatgaaaacaatatagatagttttttgcttggggttggttggtttgtctgttttagcactggctgtgtgacaagtgcagtctgtgctttacctgcaacatcgctttaattctcacaaccacctagagaataaacactgtgagcatctcgtctcattatagaggagactgagacttaaagaatttaaagaacttgctgcacttcaaagctaatacatgttaaaacagatatttgcattcagatctgtcttcccctaaagcccatgctcttaaccattacactctacagtctcattcaatacttaggttatttccaattctatttaggcacttttagaccccatcttaatattgagaatctcatttccttgaamatcatgctttttcctttcaatatgccacgagtcatcagtaccaggagcagaaagcatcttacttactgcaattacacttgctaatcaattctgcatcactgcccagtgttataaatgtgtagttacctatattctattgacatgtggcctcatttcttactgaaatgggcagtagtctcaatttagaggctcttttttttttaatagcacaggggagccaaagaaatatgtcaatctcattgccaatcaaacagaaataaaccattgtgttcattcctcataccggggatccataagctcagtgtgatccaggtacttctgagttttaacttctgaattaaggagactatttctgagaaactgttcttaccattattttgaaatttccctttaatttttatattgataattatctaacttgcattaaaatattcagtattattttatagggtttgaaaaccactatatggagctacatttctgctaagctttacaaaataaaacatcataaaccatgtgactatgttagaagacatctggattgattcagtggttgactagccaaccaccctaaaagtggtataatgaagggtaaggaagccctgtcacctccaaaggagaagccaggaattataaagtcgagcgggtatcttgagtgttagttcaatgaaggtcagcaatgatgtccagggtgcagaaggagcaagggcaattaagaggcagaggtcttagcatcagctagttgcttaagctgtagatacagagaaatctactgtcatggctgaggagtcactggaagcatggtctgcttttggggaaacactgataaaagtgagatgagaagagcacaggaaagaaaggagtaaaaactagctgccaagaaaaatagccacaaagtggcaaggaggtttagggggagtgcagagggcatggttacttaaagaagctgttatgtgaactccagtccacctttaagcaaggcatggagacaatatactattttcagagtcttcttcctgctcaagggatggaatatttcctaacytagtaccttcctggggcattgttggctcagacatgggagcagtagtccttaaccagaatgagtcagactaggattaatgacagttgaaatgggcttagtggcatcgtcaggaactatcaggacatgacagagacttttaaaacattgcctttgtttatttggcaatagccatttatttcctcatttgatgtctcttaagagtaagtcaccagggcacagttaatagggagatgagggaagccaacagctcattcactgcatcatttttatatctgccctgttcagccttctttgaatggtgcaaaggggtgcatggtcccatcttacagaatcaacgtggtttcctctgtgaatatttgtctagcttaggctgtgggtgcttctagtggagcaaatgcatcttgcttacttttcacattcactaagatatgatatagaggcagcctaacatcatagatgaggaaagcatgaaccatggcatctctcaggcatggatttaaagcttagctctagcactgatgagctgtggggctgtaggcaagctatttcaccacccatcttctcatttctgaaattggaagaataacttctatctcacagggatacatcaagggttgaatgagacaacacacattatattgtctggttttgactgcatattggttcccccccaccggctccctgaggccatggacactgccctgcggcctggcagcttaaggaacatgtccagcccactctggaggatcattgcactataaatgtcttttcaactttttcactacccaagaggagtcttagacatttgggcagcaggaggaaccccctgtttagtagattcgttcattaattcagcacatttttattgaacacctaccatgttccagacccagattttaaaactagacatgcagctatgaatgactagacaaaaacacttgccttcatggagcttacattctagctgggggagagacaagcaaataaaccaataggcaaattacatagtgtgtcagaggttggtgagtaccatggagaaaaataaagcaggaaagtgagatgaggagtgtcagggtgcagtagaataaatgcaatktgatgtataccagtcatacttcagaaggtgatgaagagaccctgaagaatttttttgaattaaaggacctcagagggaaagtccattctgcctgtccccatccccactctccctaagacactaggttcctcaggaagatgctgccccttcttagtactggtattcttggcacccagcacaacatctgacacatacaaggcactcaataattgtttgttgaaccaaactgcactcctcaaaccttgctcaggagccaatgtgccctttgacacctgaaatatcagtttgcattaacagctccacctgcacgcctcagtttgacatgcagtgagttgtgagcctgcatgttgtttattgatttgactaataataagtaatggagtggcaactcaaatgacattaatgtggaaggaaatgaacaccataattgaaatgctgtcctgcatcaaggcacctttgttactgagagaagaatttgattttcttacacagtgttttctgtttcacttcctcagctctcagaactgtaaaatcccattgaaaaggtgtgaaaggcaaaagcagggttttaagtagaaattcaaagtctgtttcacagtagtaagaaatggtgatagtgggatgaactcaatgaaaataggagaaagtagagaaggaaatagaacaagagatgtgagggcttcaaatgccagaagtaaatctatccagaaaaataaagataattggccaactctcctttcataaggttaaaacaatggccttgtcttgacttttrttattcactctgttattcatttagcaaatatttatggaccacttaccatgttttgggtgatctactaagcaacttagggtgcataatcattatccctatgtcataaaaaaaaattggctttcctttttccccggttcctgggaggtaaccactaaacttttgtaatttcccaagtgataggaatgtctctgttttccatggtggaccccttggaacatacacctgatagtttttgctaatgaggtgactcatggtgggctcccagatagattatgctaataaggtgagtcaagatgggagctggctgcattagaaagaccaactgtgtgattagaaggctggggctttgagctgcctaatattaacccatggggaaaggaaagggactggttattgatggccagtgaatcatggccaatgattcagtcaatcagtggacacaattaagcctcaataaaaactctggacaccaaagctcaggtgagctttcccggttggcagtcctataagtattgtcatatattgatgtgctaagagggtaagatatccttgaggatggtgggagtttcacatttagaatcctcccagacttctttctatgcatctcttactttggttggtccctgtttgtattctaatcacaagtatagcatgatcctgagttctgggaggagttctattgaattaccaaacctgagggtgtccgtggggaccagtgaatttgtatccagctcatcaaaagtgacagtggcccaagagacctccaaacttgtgactggcatcttaagtgagargagtttgtggaaaactatgcccttaactgtgaagctgggactaactccaggtggttcttcaagtatctcagagtctagctagcaaaatcaaagaaagaaaatcacattcacccagcaatggtaaggctatttgcatgmaaatgcatcctagtatgtcatgaaagagcaaggtccgtgccatctaactcatggggataatcaaaggtggccttctagacaaagtaaaacttgagctggatttaagcataactactaattagcaaagcaaggcaggggctaggtaatggagacagaaagagcagcgtatggaataacttccagattcatccttgtcctrtcggaatcgatgatgataacaacaacagtagtagtggctacatttacttggactattttttatgtgaaacatgcttactgtttgttgacttatgcagtaccccaaaacctcatcgagaagttattgtggttcatattttccagtgaagtaaatgagatttagagggtgtatacaatttacccaaagccatccaactagtaagttgccacacctttgcttcacactttggtttatgttatagagtgaatatttgtgcctcccctccacattcatgtattgaagccttaatgtctagagtattgatatttggatatggggcttttggtagataattagggttagatgaggttgtgaggataggactctcatgatgggattagtgcccttttaagaagagacatcagatagtttgttctcttctctccccaacttcccccgtccccgccccatacacatacacacaaacacacagagaaaaaaaaaggccatgtgaacagaggaaaagcaccctcaccagaactcaaccacaatggcaccctataatcttggagttccagactccataactgtacagaaataaatttctgttgtttaaaccactcagtctatggtattttgttatggcgatccaagcaaagatagtttctgaacccagaactcttatacatgattatggcactgtatttcctttgggaagagcaacttagcctctgaaaaatatgattactgtaaggcatcctgtctcctctagagtataatgcacaccttgaggtgggagaaggtgctaaggttgaagccaaaaaaaaaaaagactccagttaaaggctggttctgtctcaaatcctctcttatctaaatgaatagagctgttaatttctgttgtaacatattcttgttactggctgctaaagaatsctgagaatctcagtgcaaaagggactctcccgtctgattctagattcaagcagtcctccaacttaagcttcactaatactagttggagcaaattaactaccttcctaggtagctgatccttcatcatacagatgagatcattagaaactttcttcaaggagttgaaatttaccactgtgtgttttccactaattggtcttgactttatctgtgagaaaattaaggcaaacattaatggcattagcaagagggtggctgttgtatctggttctatctgtaagagaattaaggcagaaattaatggcaatagcaagcaggtggctgttgtatatagtggaccatatgagaagtcttacagttctgtcttgaaccctttctagccttacagaatccattatagttcattttaagaaaatcatgggtctggagttcttttcagatatagcctttggtgattcatctttcactataagcctttgaagtgtctagtcatatacataagtaatcttttattcaactcttattttctgtgtatgtattcattgttcacaytggatttattttatgtaaatcaagtccctagacatgagggaaacaaagcaaagccagattaattggctaattttcaaagactcattctacattgattgcagcttttttcccatgaattttttactatgctctctctttgctatgctgagtctcctttgaaacaactatatataaagttggtatatagaaagttgacccaaatcatctcattaaaaaaaaaaaaaacacacatctgcaatagtgacctagttctcattttatcaaactcagcaggtttaaaatataatagggggaaaggggtttttcacaggtaaagcttttcctaatgcctttctaatcctatacttgctgtatgtacatcttttttytctctctctctcatccttatttttccacttttgccattttaactcatgcatttagaaaatctccacaatgaggctggttctgcaacgttggagaaactgcaaactgaattagatttctgttagagggaggaactgctgctgccagaatgaaaaagcgaggccagcaacactttgcttgaagcaaacactaagctgacactactaggagtatcagatctctcccgtgtcctctggcctcgcagtctcctttagcaccccctactggcagaacctaacaaggatcagctggcaaagcagaaacgcaggttgctagtccttagtcccagcacctcaaagcaaagtacagaaagttagatttgaagctgarggacagtggcttcataaatggcatggaaggtattttatgttaagatttcagagagtacagtttctgtccttggcttcataggaggtcagcgcaatacagcccacaggttgtggggagtaggattaagtcaaatacttagtgtaatatctttgtcccattctcagtctatttttgtttgcttccccaaatcttagtgtatcaagatggctgctggaggggcgtctattctgaatacccctaaaggtattttagtgggagagataaatcaataactgctatgtagtgtttattatagacacatagcagagcaactattaatacacagctatatcatctctatatattatatgttactggcatatataaatatatcattagaagtctgtttctgttatataggtaaaagcytaaggggaggagaaaacctaacttaaggaaaaagcatccatcctccaagactgtctaggaaaagtgaatgtggacaggggccaactatgccccaccagttggttctttcctccagttattcttgcatatctgcagcatggaatgtcaggcccacctcctccatattcagaaacatcacatatttggccactatcctaaccattgttttgcagtcagacttccagccattcagtttcctggatgttttggagaaagaaaacaagacaatgctgaaaataaagccttaagacttatgaggcaaagagaattgcagatctcattgtgcttgagtctctacataattgggtggttctaaatagggagggctaatttcatggggtcagcactggatcctgtaaaagcatatgccatttaaaaattaatgcttcatgagtgctaagtccaaagtgtctcaagagactaggggagaaagggtttccaggaatgagatttggaaagaacataaggatgaaatgggatatgcctgtaaggaaggaagaaaaatgtaaagaaattcagttctaataaatcaggaataagtaaatcttgctctgtctttgcacacttctttttctgcatccctgtagcctggcacagccctgtacaaacagccactcacctctcaccattgtaccttatccttatccaatctcaccactctgacctttaaataagaaatataacatttattcttatgtgtatcatggcaatcttcagccacagaaaccctcagaattcttaatataagcaactgatccaacaatgatgatcctgtttaccaaaagttataataacatctatgtggctctttatactttacaatgcccttttgcatcacgtcttttagtcttcacaaaaaccctgtgaaataaataatattatccccattcttcattttttatatgaggaaacagaggctcagagttcatataatgtgcccaaaatcacatcatcaataggaggtagatccaggacttgaactcagctctcctgatgccaatattgacagcccttcagtggcctgtgtgaaacgtggcacagagaaccatgtaccacaaagcctcactgtgtgactgggtatcccaaggtgatttcaaaacccagccaaaagtatattattggcagatctcctgagccaagtaattccaatatgagggaacaggataacaaacgtggccactggggagacattaacatactagtttgggatgctgacaattgtttacctgctgtcactcacttacagacatggccaggcagcagtgtcaatcttgctgtgggctgaaaccccttgttgaaggaggcacaaggtagagttttgtcattgttcactttcagtactcttaagaaagtgattacaacactttcttgtatggatttggtcatgaaatttcattctgccacagattgaagaactctgccctgatgtagaagagaaaaagatatcaccccaacaattaactaacatttaatgttaattattaactaattataattaactagcttatgttaattattaactaacaattaattaataattaactaacattgggcacttactagatgctttgtatatctcatttaattcccaccacatcctatatagggaggtacccttattgttcccattttgcaaatgggaacaccgagactttgataggctaagtgacctgctcccatagggattaataggcagatctaggattcaagcttagtccctctgactctagcacctttcctcttaatcactgcatcatatggcctagatgttaaggttgtccttaactacccttcactagccactgaaattatttccatatgatgtttctctcagtaggtttgcacaaatgtgctagccataacaatttacaatgttccagcagaggcaaggaccaagacacataggagccaagtgttttaataacttcctgtgctagcagytataaaaatgtaattgttggtgcacgttcaaagaattaaaatatggcaaggtagaaggagctcttaaagccagctttcagaactacggctttgcccttgtaaacaacttttatataccccttttggagtgtgtataatgaaatgactaacattttcagctgtaaccggagctattacccagcagctgactgttttgttgcttgaaatctgttcaggaaaacactgaaaattggtggaaggggtagactgtggggactccttgtctctgcacgggcacattttcctcgttgtcccagtgaaaatggcctgcaggtaaattgcacccatgccttctcagtataaaatgaagctctcatctgcctattttgcttctgcttttaataccgatgtcccttcactcttgctcactaaagtggaacatatggttttctttatttttaatcttctccaaagaaaactacaagtggaagattccaggtgcccacctagaattctgaaacttacatgatttacatttttgatggaagttcccagagagatatataatgagtcatttctctcctttccgtttctcaatttacataataatatagttatagttgcatgtcacagttataaatattaagaaaaagttaatatgaagttgactgagccccttttcccctgaatttcagacagtgggcctctgaagattgaacaactgaggctaaggagaaacccctgaatttctcatccaatttcaaccctgactgtgctaaaaatgagtgttttctaaggacagatgctatcacagaaccagagaggttgttgttttacttgttcctgcagactagacaggaaatcataaaattatgaaagcagaatattgtgcttgtgtcatccactgtctcttatgtcattcagatcgtaaagatagactctgttctatttccaaccctttcctatgagaatggctgtgggaatagaacattaggactgctgctctttccccaaacccaataatagttttttgctaatagtttgttgcgatagtaagttgatgcatgaagccgtgtgtgtctcagccgtatcatgacagataaattgggccagcatcattatctgaaccagatttttgtatagtgctgcatggtatggtgcttaggattcctaagagtaaccttgaggagctatgctaatgacagtacttttcatctctggcttttcctgttaaaatacagagtcatgctcttggctgccaaaatcagtagcatgtggtggtaggcgtatactgcaggtgggagtaaagcagccttttgaatcggatagccttttctctagtcttcgctctgccatgatatgcagattatgtcacttctcagaacctcagtgtcctcatctgtaaaacgggataataatacatatttaggagggttttggcaaggacatcacaattgtaaaatgcctggagatgttagatactttgtaaatggcactaaatattatcatggaatatatgctttggtaaataaaaaacaatggtttccatttgtttggatgatgataatgttttaaatccttgatttatgtaattgtggtatcactttcctcctcaaaacaaatgaattgctctgcactgcatataagataagatcaacctccctgtttgtctcctgtaacacatgtacacacagacatctgtaaaatccataattcagccaccgttcactctggactattatcctgaaccatggactttatgttatgtcagtcatttagaataccaattccttctttctctacatgtagaaccattttatcagcctgttgagccccatctgacctcccccgctttggagcctttcataagccccctgattcaacttggggttcctcagacctccagataacctttcatcatacctccatcctaggactctgcacaagcagcttgtagtaaagggatcttgaagctgtctttctgccccatgagaatgtgagaatcaactggaaatgggaattgtggcatattcagctctgtattcctcctcgttgtggaccaaataaataagtaaacgctggtttgtgcagaagtttggtgtttatgctactcctgtcactgctctgtattttctrcttgtttatctgtgatttgcgtgccttgtcattatttttatgctccttggcggccacttactttacaactatctgtccttttatattgtttctagactccttgtggtctcatgtaaagcatttggagaccaggggakttgttgttgttgttgttgttgttgttgttgttttactgaaatgtctccctcaccagttttcatgtggatgaccccttaaataaccagaattaacatcgggaaacaaactatgagtttgcaatgcagagtttctgccactgctattgcatgggaggaaagaaagatctaatacattaggattggatatgcttgagacattttaatcaagcatgtcagtccttctgcaaatagaaagcactggcagcaaagagacaggattgtccaggggacaggtcgggaatgctagaaacattagaaagttcactttcctaataccctcttcagcttaaggcttgcacatttgcgcggggcacaggtgcatgcctgctcagagctgaaagagccttactgtttgctccttcagccccccattgacagataaggtaattgagtccaaaggtgaatcagccagttcagatcctgttggcaattagggaggaaagcaaagaccatgacaaaagtcttcaggctccaagtcccccactctttcctcctctataccttgtggccactttctgtacactgattacttgtgtagttcaaattttgacattttaagaattcatttaaggaattaattgcaactttcatcattaccyctttttactttgaggtagcaccagatttcaacgttattaaactctgcagctccatgaatgttgaagagacgagccagcacctaattgccttcatgcattacctaccagcagaaagctggcctggatgaacatctgtgtgtagcttttcattttctttatggttcaggcactgtgctcctcaagaaactggttctgtctttgtttctttgcatttctttcctttcttgctggagttagggtggaaggggatctcaaatgctttttgagttttttgcacctaggtcgactatactatattttgcatttagcatcattgaagttgagatgggtcttatagtcaatggtgtgtgatagtttaattctcaactttatttcttaaaaggatggtgcatattacaatcttgctattgtgagttttaaaggtctattatagttcacattttacaaagtgcttttctgtatagtaataagaaccaacatatatcaaatgctcattgtggaccaggcactgtgggcttggtgggagacagtaactattttacctcttcctcataactcttcaagctggcgttatcctccattttatagataagaaaaccaaagtaaagtaattttgccagtgtaacaaagcagaaagacacagagccataggcacacccggggtgatttaaatccaaaactggtgctctttccacctctcttcctatcaggttttgcactcaaccttccccagaaccaaatggatggtaagaggggcagcatcagagcactgactctggagttacctggagccagttactcaatctccctgtgcctccattttctcctctgtgaaattggggtaaaaagagcataaggtagttgcgaggtttaagcgagctgagctggataaagcactgggacccagacccaacacacaccaaatgctaaggaaagatgaatgatcacattattccctggtttgcttaatcccctgtggacaccacagtaagctttgaatatgctccagttccttctgttaggtcataagccacgtggccagaagcctttagagtgccttgtaccatataccctcttctaggagagagaaaggggaaccaagacttgatgcctctgccttccagggaccctccacagtcctggcatgatgacttgtgcagaactcaccttcctcagatgctgctttcattaggaagtgactcctcggccatctcatctcttcatccaagttcccagactaaaggggagctacccacaaaactagtccctgaaaactactcatgccactagtaatagagtcaagagattgagtgcctgctgttaacttacaaattgcatggacatgcatttcactcttccctggagaaatatttcccagccacaactctgccattgcttcccaatgcctagacctaatcctaggtctcctgtatgaccaaagactgcctgacctcactgaacattaacaatgtccagcaggggtgaagctgctgccacccctgccctgtgaacctattkacttggcctcagtttctcaccagggaccactcattggccagagtaayctcgtgaggaaggtggagaaagaaaacygtagagcaagccaactggctgatcattccctgagaatcttggcgagatgaaggtgcctctcatccgtggccaagtgtaggaccagaaggtaaacatctgaagtgtatctgagagcaggtgcagagactgagtcataaagcatgcctgtataacaggtcaccaaggccagatgtattcattcgttttcacactgctataaaaaacttccctgagactgggtaatttataaaggaaagaggtttaattgactcacagttccacatggctggggaggccttaggaaacttacaatcatggcagaaggggaagcagacaccttcttcgcaaggcagcagaagagcaagcatgtgaaggaggaacagtcaaacacttataaaaccatcagatctcatgagaactcactattacaagaacagcatgggggaaaccgcccccatgatccattcacctccctcccgcgacacgtggagattacaatttgagatgagatttgggtggggacacagagccaagccatatcaccagggcatcctacagtggacagaaagagctaacgagtctgaagaactgaggaaccaagagcagaaagaagcacagattggagtaaatgcaccaagaggtgacctgggctaagtccaacatcatgggcaagtgcctctgttggggtttggggcattcccaatatgggcaggccatatctgcttaaaggaatcactgggacagacattctaattacccagaactccctgcacatggagcaaggcccctgaccagcacagggacagcagacaagctccaggccatgccccacagaccagcccttgtccagccttatgcagaacagcctgaggatcagggacaccgggtggcaatgccaaggctttcagcattagatcactgcagtatttaatcaccccactcctgattagcagtttctgtggggtttattatgcagttaaatatcatcattgggactttaaaaatattctctcttttattaaacaacaaatataatttattagcaaatatataataatatattagcattcagtttaatgtctctcagtggactcaagctctatttagctatccgcttgtctcctttcagtttttccaaggacatatgataaagcccccctatttctaaatagaatgcattttcatttaaataaaacagcttagacaaattagggtttctaaattaaacatttctaaagccatttttctcttaagaattaagagaatgggagagatctgaattatgtaagtagcatgatgtaggagtagtaaatttaaaaagtagtaataagtaatctgaacatgattaattgtttactttgtggcaaacattgtgctgagagactcaggtgccaaatgttacttaaccttgacaacaacactgtgagtggagttcttattctcattttaccatgtggtagaaatgatattggtaaagtttaataggttcctccaaacaatacagctcttaagaggcagacctagaatttacatctagatccttctgattccacagcccaagtgtttaactcagcataggacatttagattcagacctggatttaaatttcagctgtgtgactttgggaaaattactttacctctctgagtctgtaatctgaaggttcatcatgcctaccttaactgccatgatgactaaatttaacatataagcaagtgcctagtagtactataatagtactatatgtgacacatattaactactcaagaattattacccaaattcctaaatatttcagaaaattaatgggggcttttttgtctgcagtttctctggcaattgatcacctccacttatcattatagtgtggagaacacagacaagcccaatctcctcgcctctgactcggtgcagctgaaatctctttgaacggaactgggctgtggtcatgactgagtgtccatccaccctgatactgtcttgcaaacaaatgaatgttgcaagtgacaaaccgggtgcttctgccctgattctaacactggccctggaaggtttaaaggctgcatgatgctggctgggtcctgggtggaargtgttgcctttgtatttcttctacttaattgtatgacccaaaggagaagagcagcagattttttttaagccctttcaactagaagtctttattatgtgtggacttctggctaacagccacatagagagcttttcctaatttctttcaaaatatgaggatttaagatggaactaaaagtggggaaggaaagtttagcaaaatctgaagttcagtgaaatctaaaccttttaactaaaacaagttaagtgtttggctcaaatttcccaatgtttgaagcaggagaaagtaattcatgaggaaacatggccaaagagactagggattttatctgacaacagatggttcagattagttcaacaaatatttatcaaggaccatgtatttgcccatcactagacaaagggtgatatgtggataagtggatacaacccttgacttccagaagcttcaaatctgttcaggaaaagaccctaaaataagttgcttcaatacagaattttaaaaatagtaaaattatatcataaatttaaaataacaataaaatatttctcattcacctgctacatgccttccaaatgctttacatgtattaattaatttcatcctcaaaacaacccgtgaggtacatatttcttttattcccacttatgggtgaggaaactgaggcaagatggcacagcttgagaatggcagagctgaggtttgaatgcaggtttggctggctctgtttgtgccttctttctcctctgtacccatgtcctcatccaggagcagggccgctgtgttgaacaacttcaggggccaccgtttgcatcgtaggttacaggctgtggagttgagtactatctagcctatgaagcttgtccagcctagaagatattaagatgggcattaatgtactcatttcatagggttaggtgatacctccaaagtcacatagctaataagtgacagtgctgaggcttggaactgggtctgccacccccatgcatcttggtctttctagactccatgctaggcagctttgctcctcagaagctactatgtgagcacagggataatttagtatggcagcgcggtctgcagaaatggtcagggcaggcactgggaagaaggggcagcttgccctttaaactgtgaattcccaaaggatctccataacctgccctctcagaggctgcagctgtccctgcactcccatgaattcactcttctgcacaaataagctgcttcattcctgtcatcactgcaaagattctatgggaagaaaccagacaaaaagtcagctgaatccaggtttgccaacttcactcacttgctcaacacatgcaccaagaacttactaagtgttgggcgctgttctaagagctgaggatacagtggtgtgcaaggcccttgctttcatgaggcttctatttcagtgcaatatctgctgcctatgtgcccttccacatgtaactcaaacgcttgcctgtcggtcctcccatccgtgaaatggagacagtagtacctgcctcataaagttatggggaggctgaagtgagagaatgaatgtaatgtgcttagcagagacctcacctattacagagacctcaccccttgcaagtggtcaagaaatctcattctgttctccacccacttgccactctacaaaatgcttgcagacagacctgcctttgctgctggctttcctctaggtggcgagtgtacttgtttgctgctttgtaagttcggtggattattccaagaccatttgactagcatgggttaaagcagtaaactggatctccgtgttcctctactttatatacattatgattctgtatatgaaaccataaaactcaggacagatttatacatatgccatgctgcatattttcatagaaatgcttttccaggcacctgtaatacactgatatatgtgagcagtttgctaaagtttatttctcatagatctctcttaaactgcatgtaaagtgacattttatggtttaacttttgttttcatgacacagccccaatttgcatctctgccatagcattcaggacttccctgcttacagcatgtgtatttcyctgtccttgaagcatgtcttcgggaagctagttctaaagaccccagtttggcatctttcctgaagaagccaatccttctgtgactgtcttgtggaaatggacttgaattattcacatcccatattcaacttgcttatggggtattcatgcaaagaaagagagtggtctcattcttggtgtggtcacagccctcggcatgacagcggctgtgatatctcattgcccatttcccgagtggtttttgcctggggttaactcagcctttctgacctgtacttccttccatcaagttctgaaacaaaatagaaaagaaagaaatgcacatccaccaagtttcttctatgaggcagactctttatgaagcactttgcagatctataatctcactaaagacctgcacatttggtagtattgaccttattaaaggaaatagttgcagaaagattaaatacattgaccaaggtcgtcacagctaatgaatggtgaagccaggtttcaagttcagatctactgatcacagatctttccgttgcaccaagccctccagcatccaaggcactcaaaggggttctaggtgggcatagtgtaaccttgtcatctccatcttacttataggaagccatttatttgaatggtcattcaacaaacattttattaagtgtatcttatgtgctaggcactgtggtaggtgatgcatgtgagctagctacamctacatatatttaaaaggactccaaaaaacttagttttatatatatatatatatatatatatatatatacacacacatatatrtatatatatatatacatatatgtatatatatatatacatatatgtatatatatatacatatatgtatatatataaaaaactaagtttttatatttatatatatacacacacatatatatacataaatatacacatatatacataaatacatataaagagagacagagatagacagtcagtcagtctcattctgtcacccaggctggaatgcagtggtacaaacacagctcactgcatcctcggcctcctgggctcaagaagtccccctgcttcagtgtcctgagtagctgagaccacaggcatgcaccaccatgtctagctatttgtattattattttagaaacagggtctcgcgattttgccctggctggtcaagaactcctggactcaagtgattctcctgccttgccctcccaaagtactgggattgcaggcatgagccaccatgccctgcccacagcaattttttagtttcaaaaggatttctcacgactgcctccggccactataaatgttttgtaaggaaacactgactcacatagtgactattttcttcctgtgactccagttgtcccaggctcatattgggcacactcagaggaggtgcttgctgaacattttggagtgaatcaatgaatagatgcattcacgacagccctaaagaatatatggcacatgtttgtttgcttatgtgcattctccacaggccagtgctgtgtatctccattgcctgccacagcacctggaacagattggaggcttgctgaatgagtatatgagtcaacagatagttaatatcagaccaatttaggcacaattagaaacaatcatcagatgcatcagaaatatcaccagagtcatgagtgtgagaggagtgaggcacaagcctcaggtgcaaaatttaaggggacaccaaaaaaacttagtaatcaagataaatagcattttaatgcaatatttgaagtattcaagacagaatctgaatggactaagaccaggataagtcaatgagatgcatcaaccaaatgaagagctggatcctgtctctgtttaaaatttttattttttcatcctttcttgcattgattttggcttttaaaaatattgcatgaaaatattacttatctcaatcactgagattttggcacctcttaaattttgtgcccaaggtgaatgcctcaattgccttaacctagccctggctctgtaaagccaatagcagtaactgaaattccttgatgtcagattatatgaaaggtactttgtgcacataaagttgcagaaggtccccaaaaggtctcgtctggaaagtgctgttctgatctctgtttcacagatagggtggctcagacttgaggagacaagtctcaggacacactcctgagttgttacagatgaatcacagaggcacctgagagattgagcttctcagtccccaaggggtgctgtctagaagctttggttacagagacccatggaaggctgcctccaaccagatgaagcctaatgcatttaccccagcatgctgcacaaataccatatcccactgattcctgccattataagaagcaggatgattttatgtaccatgttcctgctgccaagatgacagcaattgtaaggtgctcacaattgtaagatatatcccaacttaagagattttatcatgcaaagaagtgcattttggaattagatgatatgcgttattatcatatcccaagtgaccatgatattgaaaaaagttggggagactgtactcaagggtacactgcaataacagacataacaggattttggcattctccaaatatccagaagtccattcaccacccccaggctgtcaaaagctgctgtgattcctgcaatgagacaaactttaacagaaaagcagaggatgcttaaaaaggagactacttcatttgccttctggagcgatttccctgcaagagggaagattgcagtattagttgtctggttatattattattgggtgggttcagaattttatctacttacaaaattatttggaaccacagattaaggaaagagggctgatgcagtgcagctgatgtgagactcagaatctcttttagttaccagcctctatttaaagaaaatctatgttgagctccagagattccctagctgtcatccagggcgtcataggatggttttgggtttattatataacactaaactgtccatattattccacatcatactgatctgcctacctcatcaggcaactatcagcacacctaattaatttcatcccaaaatattacattaacatttatttagacttgttcacagtgctacattgatccctgtcagccactggcttcctaaccattttagggcatgatcgcaaaacagctgagcctgcctcccatcatgtacttttctaaaacatatctacccagcacagacacaaatcagcccacagcggtagagcaagcgcgacagcattagacttgcatgatttgcttaaaaggcttgaaattctgcctcatgtcatttttatcaaaattccaaatcagatgtagtaaagagtaaaacatcctttttgctggcattcaaaagactatggagagattaatatggaggggcatggcctgaagccagactgcccagctttaaactcagctttgcctcttactatgcctcagtgtcttcacttgtgaaatgaggataataacagttgctacctgttaagattgttatgaggatttccagggctaatacctgtaaagcacttagatcattgtgcaacaaggggcacataagattggctggcatttctgaccataggcagccccagctcagggtttccacactcagacagtcatcagagcttgtctattcacccaaggggtgtgatcctgcagttctgaggctgctgtataaatggatttgcttctcctctcctgctctgacctttccttcttcaacattggatggatgcagttgtcacctggaaggtggttcctgattgataatgatgggcctttaacttattgtgcccagtgcatggcaggcacttgataagtttgggtaaaatcaggcaaaaggccaatgcctcctttgcagacctgtggtatgtctgtaagtgcttccattttctctgctccatggtgaggtatcctctcccttcctcactggaaaaattgttaaagcagcaagctgccctcactgggctctcgagggatcagggagaccagagaccagctgttcacatagatatgtgaattcccttgaatgtcctctaaagcttactgggtagaatgccaatgttagcattcatgtccatgagcatttctcaagggaatatgagaaacttcagatcacgtttgaaatatctaaggtaataaaactaataaaactcattcacagaagccagtcgccctttatttagaatcttcacatatcagagatgatgggcctatatgacagagcgttctgtgcaagaaagaagcccactttttatcctgtcaggaaaagaggtggacaaggagtggaaataaagttataaaaagttatcagagccttaggagaagaaggatctgttcaatgctgagtgcattttgagtatacttttgagttggggaaattggatctgagggaacaaaggggactgtactagttgtttattgatgcataaaaattacgtcaatgctcagtggtttaaaacaatatttagtttcacacagtttctgtggatcaggaatttggaagcagcttcactggggttctggctcaaggttccacaaaagtaaggtctactttcaagatggctcactcacatggccatggcagaaggctcagttcctcaccatggggcctctctgcaggctgctagaatatcttcacgacttgacagccaacttccactggagtgagagatccaagagagagtgagcacagagaaagccgcagtgcctttatatcacagtctttgaagtgatctcctgtgctgatgttctagggctgccatagcaaagtgacacaaactggtggcttaaaacaataaaaaagtattccctgtcacatctggaggtgaaacattcaaaatcaagatgtcagcagagctgtgctccctctgaaggttctaggggaggaatccttccttgcatcttcctcattcctggtggccaccatcaatccttggcattccttggcttgtaaatgcatcattccaatatctgcctccatcttcacatggctgtcttctgtcggtgtatctctttgtctgagagcaccagtcattggattagggccagccataatgacctcatcttaactaattatatctgcaaagaccctatttcytaataaggtcacattctgaggttctgatggacatcaaatttgtgcggtgggtgtgggtgtttctatgcaatccactctacccaccatcatttctgttttgttttattaattagcactaagtcgtaagtccaggccacactcaagaagaggggaattaggctctgcctcttttgtggacatattttgaaactacctcaagcacagtgttacacttccattccagaaacctgttatgctgggactttctagtctcatgtgaggttgtatggctcagtgaaaagagataagaatatttacagacattccatgttatttaatgacaatggatacctagaaaacgctattttaagtgagttatcttaaaatgaaaaccaaaattcatttaaagatgagtgaaaatattttgacttggattttacattgaaaatttatttaaaaattagtatattttacttaaatttgaaaaatatttcaggtaataaatataactattcactaattcttgaaggataaattgtcatgtttcaacttttgttacaatttttctaataaaaattacatgatttcacaacatattctttacttaattttgactttctcaacatcacaaaaagggttattttacaaatttcaagtattttatcaatattccctaattctattgggattcatggcattctcttctggaagcctaaactatcattatccttaaaaatttcctcttcttcaaataagatctagtaatgtttctgtcacatcatcatatcaataattctgcgtgtgattccagcagttcttcaacatcacttttttaaacttcatgaatctcccatttctgggggaaatttaaaaatttaccttataatcaatttacagagcatttttataagactattttataaaaattggtgagagatcagttatgatgttgactaagattccagtggtaagtcgagactgattttgaatggggactgattttttaaggggtcaattcagtgatgactattttcatgctattgtgaatttacttttctgtaaaactttgcaactgtggagactctaatcatgaaaaccaggtaataagaactccctgaatttttctcttctttctacagctacgcttctatcctcctaaagatagcattaaaatctttctatcttctttaatgcaataccaaaaaaagtaataatattagaattactttgaagggaagtatattgctgtagggaaaggttggcatatataattagacactattactaggatctatttgagtcatgaacttcttcactgaagatgagcacacatcatttcagataaccaagagaagatctggtaccttgattccaagggagacttcacgtgggggaaaaaaaatcaaccagcaactggatgattccattttaacctgccctgtagcagaggtctaaaatttgttcttcaaaagtcccatgaagtcttaaaccagtgtgcaaggcaaaaaccagtgtaacaaaaataaatgacaggatgtcttttcttataaatgtcacggtttattcaaaggctgtgtaattagagagttgtcaacttagtaagttttctgagcctaacattagaggcccagccgtgagaagctgtctacctttctttagagaatggctccttcccacagcaacccactccagtccgactttacccattcagaatgtgctagatgcctggagttcctcgctgtcttcaaaaacagattgcttccactgctggagatgtctccacagtttgtttcttctgcagctgtttttctttaaccttcactttagcttgtttctgggtgaattttggctatcacttcagtatctccatcaatcccaacttcaacacattcacaatgaatttttagcaatggagatggtcactgtacttatcatttgcacataacttaataagcctgcatatgtgcattccccttgttcaacttctggaattaacccattctgcatagttcccattctgcacatttttctgcaccagaaatgaatttttagttgtctctcagaagttcatttatgaaaactgaaagccagctgaagatatggggtcaggttgtgttgttccataccatatactgttaactttctcagactaaatgttgccattttcattgatatgactcttactaaaagcaaaaaaaaaaggtttaatatgaaagaaaaataaatgatcagttatacatatttctctgtgtaagtgtatatgtgaaagagagtttcatgccaacgatgccttatcttttacaaggatatgtttccaacaagtaaacctagtgaccgtgacttttcaaaactgcgcatgatgtaacatataatgactgctcactctaaaactgcacacattctgatagtgaacacagagttatctgacatggtgcagtgctcaactcaatctcggtagtgtttaatggataaacaggatatatttttacatttctgcagctgttgctcacaggcagccagttctttagatcttcagattttctctataattgtgtcacgccatccataagcagagttccttgtcccagaatcagtgtatcttcttgagcctgatcctattctaacagcatcctttgtgattgtttttgttttttctctttaaaaaaaataagtgttatatgtagatagtaactgtagctgaccctgttggctatatacttaaaatctgaccttctcttcttcattgatgaagtactgattttgttcaggtaggccctctcagaaaacatgaccctatccctcttgggggacaaattccaaatagtctcagactatcacaggaatcccatactgcttataagtgactgggtttagagctatgcacacagaccttgttcagaccagtgaaatgagaaagtgtcagagcatttatgggaaatagttccttggtcttaaaaagaggcagaaggaaaagacagccccttctcttcctcttgtcattggcatgcctggatatgatgcatggaactgctgatgaagcaaaacttggaaaggaagacagggtcacagtgaagtggagtcagggtcctaatataccctccctggagctttcctgacctgtggacaccttgctctgggagacaataaatcataaatttaagctggttaagtccaggttttctgctctttttgccaaagcggtttgaaaaagtagccaaaataataaatcaacccatactgtgtgctttgcttggagggagyttctgcccatgtttacttggtgattttgaagactaaccaaggtttctttgaagtgaaatgaactctagtccaatttctcttgaaaccttgtacatacatcctgctatttatcctatttattggagtttatttgcaggtttgtcttcccacacttaccttggaaattcccctgtggaggagccagatgtgcaccagaaacactgccatgagcaccagtcagtaaaatgtcactagcaaagaagatgcactcttttgcacactggtttactggggaagatgctgccagagttagagacaatactagtgtcatagctgtgtgtggaggccatgaaaccaggaaaggggactatgaaaattaactatcagtatgtatctacacacagtcacataagatggcaactgtgaatgacatgcggactgaagatggcaactatgaatgaaggcttaagggtggtgtgggagggtgaggtctggacatactgctgtaggaaagggaatggaaggaaccaaaagagctagtctttcttatgggtaaacaaaagggacttggcatataagaaactggttctctccaggaaagcaggatcctgattacctggttgataaaactgaaggccgttaccatctctccctactcccatcacttagccttccagaatattacttcagctctgcttctgagcaagcacatggstctcatgaaagggactcagctctggtttgctttctgtttcttaaatgataaactgtgagtttgttctccctgaagtctgcctctgttactgctttggtttcaatgctggtctgttttgtttaagatatctgtagccacagccacactttttttcactgtggttttgatatcgtattttcatactcaaaacttcttggccttccgctcatagtcagtttcctagagatgatagcttctccatttgtactttcctctgtacttgtatgatccatgggaatctcagactcaatatattcaaaactgaaatcatcatccttcccatcctcaagctaagacctactctccagagtcaaaaacacaggaaagagtcttaatttctccctccctctatctatcacctaccaactctgtgttattatagatataagaaactatagtacgtgtgtgtgtgtgtgtgtgtgtgtgtgtgtgtgtattaaaggttgggattgagttcagagttcaagtacattacaaaaatctattgttgggacagaaatgccctaatataatgcaatcagaagtactgcattctgcctttttgtccacatcagatatctaatgaatgcatgtcaattatccagtttgcccagaaaggcaacaaactcagtaaaaacagcatgagctctgtggtaaagcctgagtgtgaaaccctatcttgatccttgctagcagtgtgctctcaaactaaagaaatagcacttagtggggtccgtattaaatacttcacctgcctcaccagtgaggtgggcactatcattatccactttcccaggtgaaaatcctgaggcgtaacatgattagttcaaggtcacacagttaagttatggacccaatattcaaatctagttatgctagactccaaaacaggtatacttaaacactatactctatttactttatgcacatgagcccgagtttttatctgtaaaaggagttgagtatttactttctagcgtaagtgtaaggaataaatgatacaatagaaggaagaaacttgcaacaatgtctgacaccgagtaacactttatctaaatgttagagacccattgctcattgactagcagtgtgttgctgattcctggaattgattttcatgtggattcctctgccagagctatatttgcatctcttccaaagttttctaattttatatttcagtcttctttccatttaggattttggtttattttagttagtcgattataggccaatctctctaccaagctataagcccctccagggtcccctgtcattactttatatgtctagttatcagttcatacctggagcagaatgagtacttacctaatatctgaggaatcaatcaatgaattttttacttcatttctgtttttaactgcctcttctacaaagtagttccttttttttttttttttttttttttttttgagaaggagtcttgctctgttgctctgtcacccaggctggagtgcagtggtgcgatctgggctcactgcaagctccgcctcccaggttcatgccattctcctgcctcagcctccccagcagctgggactacaggctcatgccaccacgcccggctaatttttttgtattttaagtagagacggggtttcaccgtgttagccaggaaggtctcgatctcctgacctcgtgatccgcccaccttggactcccaaagtgctgggattacaggcatgagccaccgtgcccggccaaggtagtgccttcttaatcacaacattctgcacatggtagggaagcactggatatgttcaaagcctgttgcttcttttgcttaacaatgaacatgcaattgactaaggatggaaaccatgattttatgcatttgtgtctcttccagcaaacattttgtgtagtgcctgccttgtgctaggtactgtgttagacatcaagactacaaatgaaaataaaacaaaatcaatctctgactttggtggtaagcacacgattttgtaggaaagaaaataaaaaatgaaaacaaaatagctttattattcatagagtctataaagggcacaatgatggtagatgagtaggagtgattcaatctttgataggagaagtggagatgagaagggcaggagcagggtcatggraggtgctggagaactaatctgcaggctcccttgagcataactgtgtgttttccaacgatcttctttgtgtttgagaagtacagggtatgtatatagagatatttgctatgtaaaggggaagggctcttgctttactatgcagtgtctcattgaatttctatggaagttttgataatgcatgaagtcgttccataaaataattgtcagtcttcraagaaaccaagaaacaaggctcttttcctctgagtgttaactgcattcagcgcctcatggcaattaaagcagtcccatcccctgtagttgagttagtgcacaagccacttcatacatttatttctcaggattgctgaagctacagcagtcctaagaaccacattttcatggaggtggggggttggaggcaaatgtgtgttgatttagaagctactggttccatcaggatcttttctacaatagaaatatgaaatatgccagaacattaagatatcaaggatagatatacaaaagacataggttaatgctgagactcaggcaagatggtttagtagaaatgccctaaattcagaacgcagagccaggaatcttgatttcagtctgtcatttgcttcttctgttgacttagaggtaaatcagctatctccctggggcttagattttttaaatctgttaatgtatatttgtaaaatgaatgaattagtggaagaatgtaagatgaggatcataatacctgcaccacctacttcataagagttttaaacaaggtaattaattacacgttggaaagataaaaggcttcaagacacttgccctccaatttttaaatcagtggtgataaatatcactgtaaggatttcagagtctgagaatgtacaaatgctttcatcatccaaatttgcccttgaccaggagaaatgttaacttgaagagcagatgttatattgcatttttattaggtaattaactgatttgaaactccaaatatctagcctcccatggacctgactcaaaaataaaatttaaaagttaaaaataatggaaagctttcagtagcactgaaataatgacaaataactataataatccctcatataggtatacttggcatatataaaatattttacattttcacatttgatcatgcacaaacaaaaggcactctctgatgaagcagtggttccagctaatgctttcagggaaacattgcatagtgggaaagacaaatgctttggaataaaggaggcctggtttccaatcctgacttgtaccaccaatgtcatttcagataattatttcgtaactctaagccataatttccagacatcagtgaaatgggtctagcctttcatacccaatatcgtaatgtggtcatgagaatcacatgaaattttatgtacttaatccatccatctaatttgccaaaaggtagaccttcagaaatgtcagccctcacgtcatccccactgtaattggtagaagaaggtcctacttttataacaggtaccaggataatgctaaaagaggaggttcatattttctggacaccggacttgcaaaggaaagctgtgcaaaggcccgctaactcrgttttgccttcaggatctcttccttggaggatcttcctgaaggcttggagcttacatagcactaacctcaatcttttcactgaccttcccaagttgtgtgtatgtgtgtgcatgtgtgtttktgtgtgtgtgtgtgtgtgtgtgttgtctgaactcaaatcaatgtatacatattgtttcttatggcattataaatgctcatacaatatttcactcccacatccttctttctccccagccttacaccccctttccctccttcattactccttatgccctgccaagtaaaaccttccaatggaargaggtaagtatatacactaagaattaaaacgcataacaagctcctttctctctcttatactcaagtatattcctctttggggagtatttrctgtacccacaccctccctatcaaacccctccccatcaattgcctccctcctttgtgccatcacagttttataacattcaacatgttatatgcggttatttttttacaagtctcttttcctcatacactgagagatccttaacaaaggtgtccaaatcacttggcctcggcacttcacaaatgttaagcatttgcgaatgcatgaacccatgtctttttcttctctcagagcctttactacctggtggggaagggtgggggctccccacargcgagtgggggaaagacctgggttacccaagtgccccgtgcctgtgctgtggtacctctgcccttagacagcttggccatggctgcctccatcctgtgagctcactgcaaaggagaaacctgacttctttaccagactgcctttgcctccacgttgggtcctgctacctttctcaaagtgcttttacatagagcacctcaccaaatttacaaaggattcatggggtctttggaagaaagatcacaagaggagtaatgacagtttttcttaagagtgtgtttacctaaaatggcagtgagaaatggagaaccaacctttagcctatagacaggatgccttgctttttggccaagtcaacaaagactgttgtagtcctatttgtgtttgcttctcagtcccttcccagtccatgaatgaaaagtgtgtatggaaacataaacctgcactgacaggtatattgatgatggctgagagtataaatctgttacatcctatttaatttttttttctgttcctccttctctttcctctccttgcccttgggtcttaatcaccatcatcatcaacaccattatcatggctttattccatctcatgcctttattcatgttcttccttccattcctcttctatgtggctaattcttacccttctagctcaratgtcatcttctctgaccttccttgcaacccttctctgctgcagtagcattttgtctattacactcttatggcactgagcactagcactgcctattaggttggttaagtagctgacttcccacttaaatcaaaggcaggtgttatatgttatttttttataaaacacataaagtacttagagcactgcctggaggcagacaaactcaataactgttaggaattattgttgctggtattaaaccccctcccattgctccatttcttggcaccaaggaggtacaatgtgaatgtttattttgttgaatcgaaagataacaacgcctttcttagaaacctaatttcattttgccttctgctagtttgctttcagtgcctatactgaactcaccatgtagcagaggaggaaagcctgattgctgaatggcagtggcaagccatagatagctgggatgtttaagaagtacagctgtgttgtcagcaggccacagttccaccgctgaagtgccacaaagtaaatcttgactcacaaaatatatgggtcaagggaaagtggtctctcttctcaaccgtatactccaaggcatagcctctactaaaatgccaaccttgctgcctgctgctgaaagcatctgccccaccttgtgtacccagcatgtatcgctctctgtggttaactcttaactcttccagtgggaggggcttagactacctgcaaatgggggctgacatcagtctaggaataaatacctccctgagaagctgatgtccagttgcaagatgtttatctacaacaccattgagcagccggggcacaaggtcagattgcttttgctgcttttttgagaattctctcatattcttcctatatacagctagagtagcagggaagggttggtcccattcccagagcacaacctcacactatatctggccaactcagctcctgggaaccgttgtctgtcagaggaccgaatagaattgtcatactgatcctctgcccataaatttgcccaataaagtctgcttttgcatgacactaggatggttgccattacctctagtccccactaatgagtatctttaattccctcgacaaccatataaagtaagtttaattggcaccttttagcagttgaggaatctggagctcaactaatttcaacaacgtgctcaaggactcacagtaagtggagaagtatgggttcaaagtcacatttgtgtgacactaaagccttattactttgtcacctgcctcatgtggaagcttctgctcctcatggggaagggagatcatgtgctacatgatcctcacagctccttgccagcccaggagcatggagtctgctggcatctctgaacctgcagttaaagagaaagtggaacattagtggctcgattttattatgatcatttggacaacaagcgacttccctttcttctaagtaattgccattgtacagatgatgtctttcaggggcatgaacagagaatctgaggaaggaggcaggtccatgaagagtgtccattcttttcctgttttcccatgaaatcccaaaaagtgctacatgcagttactttatgaattgaagtctgggaaaaatctctaaatcattctcatgcatgcatcatatgttgyttttcaaagggaaaggatatgcattaaagatttgttcagtcttaaacctgcttttgagcatccaagatcaatttgaaggctgattaagttgtgctctatagatttctatagtcaagttcatcaaggcatccattcctcttcccctaatgatgctgaaccccaagttcttctctgaagtgctttaattttcacttggccattgcaaaaagacagtgacttaataaactgtaaataggaaaagaaagttacataaatcatcttcgcatccttttccatggtcgtaccatgactattctttcctcattacagtgcctccagtggcttctycgtacttggcagtggaaattaaattataaaccatattttcagcaatgtgatacaccaataaaaagataaaatcatcaggataaataacaaagatgaatttatgtcaacacagcacaatattattttaccctgtgttaccataattttctcccagctgattctttagatcttttggaagatggttgctttctaatatatatatacatatttcagaactactgtctatcaatgaaaattttacaaaactgacttccaggaaaagactactacacagtacccttttcttatactctgacagacagtcctgcctttcaaaatgataagataatgagtttgtggtttgaacacagctctgtgttttaaaggtagcattgaaaattaaagtgaagtattaattaaagattaatcaaaagtgctagacctctagtaagttcagtgctttttgcttaattctgaatggcccactttgaaagagtatttcaattgagctagaattttaatcagctggctagaagttgggagaacaagagraataatcctgagggtaaatgtttaaaaatgcatcaaaggctgttggaaaataagctcttaatctgtgtcatgttggagggaaagaatgttgacaagaggacaggatgcattggtttatcctggcctccagggtggtgacattcctgagatccatcagtgagaatggccagccggctcccctttcagaacaagctactctcactaatgctcaagggagaagcctggatacctggaggacttcatcgtcattctcccagcagaggcactaagggaagagcagaggaatctacacctgtgtttggttccagagggcctctttaaattcagcacccctctcagctggaagggcctctccatccattccagaaactcctgtgtggctggtgctgacctgcctgtagctctcatagaattttggatcttagaactgaaaagaacctcagaagcctccacccatacttccctgcctccatttgaagcatggatcacctctataggtgatgtgctgcttgattacctccagtgataggaaactcacttctccccaaggccactcatttcactgtkgcgtagcttataccccatgtcctttcttgtgttgttcaaaatttatctccagtaatgtgatccttatcttcaatctctggagactaaacatatatgtgaaattgctgcttcacaagccagtgctgctgatacttaaagaaaatcaccttaaagctcctggtttttctccagataaatcctcgatggtcatcaggcaatctgctactgacattcctgttcagtttccaggtactgaggttgaatgcaaagagcccaggtataactggatgagtgattctgcccaacacttaccagattcttccttcagatccatcatgagcatctttaagcctttgagtcatcacctgtataaaggtgttatgtgagattaaataagctgatgcacataacattgttttgcaacacacctgtaagcacatgtctgaggaaaccctcaccttacacatggtatcaactacctctattctaaaattaccgggttatatacatgtgttgtcagtcaccctccctagaaggactatgtatcagaatactccacactagtcctcctcctcctccttctaaaatagttattgcttatcatgttcaggaattgagtgttactatagcattcagtcttcacaacaatccatgaggcagggctattgctatccccacattacagatgaagaaagagaagtgaggaaacccttgcccaggtggcactsggggtgtggaagagccagattcaaacccaggtctctctgacaatgggttcaactgaaggccctgaagcacctagaagttggcctggggaaaacaggaatgggaatcttctaggaaatctccctcttctaggagcggagtcccattgccagatcttgtcaacgagggagcaagcttggagtgggattttggtaggcatcagttgcctatctagcaacccctyccctcccttctttcttaatagtagaatctgaatgtctttgccccctgtaataaagcatggttggtctaagctaaccatgactatcacattcttccttgtcagatccttttgcaactagcggtgaccttataaccctgtccagtcagtgaaaaataaggtggaaggaaggtctttttctgctgctgctgctgctgctgctgctgctgctttttcttttctccttggaacaatccattttgaagatgccttcctcttttttgttttccttttcttcttggaaaaataaattgaaaagatgtgctacttggagccattgatagtcttattggtcattgacagtgacctttagacaaccaactttaagataaaaagtaaactcacaaaacatgggaagatagaggctgaatccttactgatactttgagccaccacagcaaccctgaaatcacctattcctgccccatacttcttgtcacatgacaagaatctgaattgcaaacaacagcatccactgtagtcaggaatctgaactgcaaacagcttccactgtggctagttcaaattttaaaaaacaataatttaaaaggatgttaggggacttgcagactctccatgagggccagagagagccaagctttaaaactacagagacaagaacaatgtccaaccatgccatgggaactgtttcaatgcaagcattaccatcagagctattgctctcagctccagttctgcacgtgctggaatgctggaagctctgcttggctccttggaagaagtagcagcctcttccgtgatgaatctcagaatagtgagtgcccacacatggccaccccctcacattgctcactcatgaatccaagtcttacatgggtatattcgattgatataggttggtgcaaaagtaactgcagtttttgccattactttcaatggcaaaaatagaacccaagttcaggcctgtggtctagctgygaaggagtctgaaaataccagttttctagtctcctgtttttgagcagggaggacttgtaatatgagatttaactaaaatatggggaagatatggagcagccacaaatggcaaatatctactagatgacacaaacacatcatcattccttaagccagtgtcagtcaagtattctgtttcgtgtctctctctcccctctgtcaggtgttaagtaagcagagaggctgcatgttggcctctttgctgaagcagaaatgccagctttctatccctggaacacttgggccctgaccctgcaagctcagggttgtgacagagccatttaatgaggtgaattcctaaagtcattsaagagttgcaactttctggcatcaactgatcataaactcttcatgaataaaaacaatagaaactacaaaacatggaagcatagaattgtaaggctggaatggatctcagaaattgtttgttttttttttaagtccaatactttttctaaatcaggtacatctgagagagagagaaaaagagattgagagagagaacaaaaaggcatccctggtctactgtgcaggaatcttatccattcctacattcagagacttttctgggatcccagtgcactcttcatgctcagtcacctatgtgtaaatactctcttgacttttttcttttttttctttttctttttytttttttttttttttgagatggagtcttgctctgttgccagcctggagtacagtggcgcaatctcagctcactgcaacctctgcctcccgggttcaagcgattctcctgcatcagcctcccaagtagctgggatgacaggcatgcgccaacacacccggmtaatttttgtatttttagtaragatggggtttcaccatattggccagaatggtctcgatctcttaacctcgtgatctgcctacctcagtctcccatagtgctaggattacaggcgtgagccaccgcrcccggccttttgagctatttatgtctatattgacccctttctttctgtgggttgggctacttctaaacttcataacaaagtttgaaacaccttatgttctaggaaagaacaagggcttataaatcagcctagcctggactccaatcctgtttgaatgagtccttgattgagcaaacaacttgctcaaaccagtttccttgtttgaaaaactggggtgataattataagcacctcactggactgtatgagaattaaaatgctgctatgctaaagaaggcatctagcacatgcctggcatatactaggtacctaagtaaatgctactttcccttctctttccctttgtggtctttctgcttagagggctgtactgattgtcaattgcatacgtccctcatgactccttttcctaagtattagcatgaagcttttcaacgtagctcctcatggctgccttcatttgcatggcactgtctttgcaagatgtcacaggggtaatcttttgaacccccatggaacacagcctcagcacctcactgttcagtttctgtaacagcttggacaatccatacgtataatgaatctttacagccaccaaagctacggacttggtaaagatttcaaacattttaaaaattaaaggaggaaactgcagggaagctgcaatgggctgcttagaggattccagacacatccatgggggcagtctttgagctgttacccttaggcaaggattggcaaacgtttttctgtaaacaaccaaacagtacatattttaggcatgctctttttttgctctcctttgtttttttgttttatcccttaaaaatatgacaaccattctcagcttgcagggccatacaaacacaggctatgagctggaactgaccttggggggtggtttactgacttaagtaacaaccagacatcttaataaaatcacggaatgaaactcttcacctgtgatgtaatgaaaatagctaacatttagtgagccctggctatgtgccatgcactattttaacataactcttcatatcaatgaggtatttttattattcacatattattaatgagaaaaagacaaaaaagatgaagcaactcaacataaatgtttaccagtaaatctttgaaagatttattccatgaacaaaatgcatttagctatgacagcaccctactggaaagtttgagcataaaaattgttttgttttccatgtttgttgttcttgaagctttgattcctcttggagtgtcttgagttagtttttatatttgtttcaatggtggaatttactgggaggtagtctaaatatgtgggaaagtaaaagtttgggatgccttattttggctataataagtcctaggaattcgttcattcagtaaattttttttttagtatctacccaatgccaagccccacataaaacattaagagtagggacaataatacattaaggtctctgaccccatgaaactcatggtcagaggaggaagatcaacatgtatgcagagaaatgaaagcaatttaacaaatgcttgcatacagttatgtgcacaggagcaggaagaatgggcaagagaatakccagactagctaggacatgtgggagacttcagagagaagactgggtgcagakagatgttctgagtttgaagaggccaaggctgtatataacctccaygaaaaccactgtctgcagtgcccagccataggccacccccttagacctcctaactccctagtcacaagaggctgtgttagtttgtacaacaccagacacagtaacagatgaattctacaatctcagtgactttgtacagtagaaatttatttcttgctcactctaagtccaaacagtggcaatgggaagaggggtgtagtggaagttcatgtattcagagatggaggctgaagaagtggctgccatcttcaatgcaaggtttccaagtttgtcctgggtgttgacatcctgccagcatatgagagaagagaacaaaaaggggagagttttatgggccaggcttgaaggtggtccacattatttctgactacattctgttagccagaactcccatggccaaacctaagtttaaggaaagctgggagatgcagttcattttgtgtacaggaggaaacagaaccaggcttggtaaagagctagccagtctgtgccacagagcctcctcaaccaccaagtactcacagagcccataggatgtgttaactctatgtctaaagatgggactagtaacgattacctgccagcaagagattaatcatctatagctactttaatgcaatcatgaaataaatatatagacactgtgtatgctgttagctagtaaaaggtgtaagagtttgccaaaatatgtccctaaagctctagttctgtgagattttctttccaaaaagtgttcctcaagtaagaaagcttgtaatgtctacatgttatcatattccatcaattctaagaccaacattttttcacattttaacatctttagtgatacattttataataggcttcttacagtttaattgtgtgtgtgtgtatgtgtgtgtgtakgtgtgtgtgtgtgtgtgtgtgcgtgtttctctcctagtggtgcatagtatgcacaaaagcaaatgaaatgctctgagaagtcctgcagattgaaaataaaagggggtggtagtgatatagtctgtttaactttgtgtctcccaaaggtattggaaaataatttttatgtcactactatccattagattgaatgttccatggtattcactttgccaaaactggtaaaaacggtgagagctttgagttcagtgccaggtggagtagctgtctgctgggtccaggtttgctaggaaggcctcataaagaaagtaaaaccttgaggagatgaatcatgagggtcccagtaggaaatgatagcacttattaggagaacttgaggcgagtttggtagagggactgtttgcaaacgtgtgtgcagggtgtagagaaaccacagggagaatgcagtgtccagcactggctgtcactgcctttagctatttgaatgagagggctaggtagagagggctgccttgagggcagcagtgacctcagttgagggacatagccagaccaatgagaccctgagtagggagaggacaatagaataaataccctggcttcttattccttcctcactccagtctcctgccagggcccctcattggccaaacccaactagcagcctgagagtaagggagccactgctgaccctaaaggccggcctcccagaggagaawcaggtgggaaagagtggaggcaggagctaggggtaactctgaatgtccacacaagcagggctctgaaggatgcatggaaaatgaattaagcatgattaaatccacccagggaaaatctggtcaccttccaactgcctcattgcttcatagcttatgaagtcctttcatatcatctttcatttgctgtcacaacagcccgtgaggtacacagagcaggagtaattatccatattttacacaagaagaagctgctttcctcacgttggagctggaaaggtcacgttggaacctgaaggcagaatttcccggaaccaacctggtgcaatttccaccatgtcaatgatgaactttgctgacggtgtcccagaagggtcatctccatgaaaggacgttgtcattagtcacttgctgcttcactttccagtagatagtacacttcagttcttccacgtgtatatagcactttataatttccatccgcagtataaaaaggtcatagaaaatccacagaaacctcaggcctcccaggagctgaaaggccattctactgggcaggccccattcctctgtacccacttcagcaagtagttattaccattgctattttgcacaatgcaaagatgaaatacacacaatgtattaagacagattataagtgcgtagagtgaaagaacaataaagtacgctgagaaaattgagaaattaagtgctatgggcatatgggcatgctaagattgatacagaagtcctatcttggagtatcagggaaggcaactggttcagtctgtccgagccaccgtctatactgcctgttgtgcaacgttcgaatcattttgttgtgtttcctttatcatggaagaggtagcttttatctgagccttagaaaaggcaaaggttaggatgagcaaaaatgggagagagtcataggcaagacactatgtttgtatgtaatgagtatgcaattgaaaacagaaacgtgcaaaagtgaaatatgtgaagtccagttgatgtacatgttgtgtaacaggtttggtgttcmtggttcaaaagatggaattctgaagtcagactaactgggttaagtccgtgctctgatgctcactagctgtgtgaccttgggcaagttacttaacctctctgtgcctgctttttcatctataataggcagcacatataaaacagacaaggttcacaccccatagggttyttatgggattacataagttaattcatgagcagtgctgagaagagggcctggtamagagtatattctacattaataattttaataatgttacaaagatggtcccagcagagttaaaaaaaaaagaaggaaaaaagcatcaaagcctaatttaacttcagcttttgacacagttttcgataatataccttcagcagttttatgcattctttaatcctcttcttttcttacacatgtggacacacagtcaacaggaaaatgcagcgaggctctgattgagctgagaaagcattgttttgacatggctaatgatttccatttttgttcctattagattagattggcagacttacgcttcctcttgctagattcagctctttcatttttgttttccactcatgatcactaaataataaagaaaatgcaacaaaatgatccgaaagttaaacagcaggcagtatagacagtggtactaacaaaccgaaccagcggctagccagcaccgctgccaaggccacgcctgcaaatggccattgcttagtaaagtgaggaagtcagaatttatgaagcaacagtgagagatgtcacacagtggtatatgatcagtccaccatagtttaagaatatagataaaacacacaaacgtgcacatatttcaagaggccgatatcccaaagtctaggagcagttgcccaaaggcctggagggaggaaatgcccaaagaataaaagattcaacgcataactatgattagagtgcagggctggggtcagggtgttatcgttttaaacaaggatgagatcagtgctggtctgagccatattgaagtctgaggcaaaaggraaaaatcaataagactgatcttgcctttatttaaagttttaaagttttgttcatcctagggtttttggcattaaaacttctgaatttttaagtacattacaagttattttaagcacgttgcaagttatttattttaagtacattacaatgttatttattttgattattgaatgttggtgccttttgaaattgtgcagggagatgggtgcctctcttccccacaccagccaatccctggccctgctagagtgtaaactacctgaagggatgtattaaatgagatctttgaactcatctggcacaagcttaaatcctggctcagatctgatcccagccacatcctgaatacgttaccatgggtaatttatctcctttttaaacgtttggtttatttctcagtaaaagagccatgaaacctaactcatatgttcattcatctaccaacaaatatttattgagcacctattatgttattgaggcataggcaatataagttaacaaaacaaaacatctctattgttatgatgttttcatcttagtttgagagagcaatgatcagtaaaaataatatgaaatatcatgtagcctagttatggtaaatgcttagaagaaaaataaaccagggtggagtgacagtgatggcagcagagaggggtaagaaagaaggacaagctttgagaaaggttataaagaggaataagtgagacagttatgtctaatgtgtcacaatgcctaacatagcctaattacttaataaatgatttatgttgctctagctagaaaaagaaaagtttggaatgacaggttgggacccacagacatggctatgctgctacctatgaagctgaaactccagaactctgggcagttctaacaattcyaccactaagagcactaactgcacagacacagtgttcaagtcttaagagttgtcatcatccactggttcagctgtgggagcatgaaggtctctggctctgagacctggaaaatggagtaatcagaaaagttccaccctgttctccctctacagtgagcacaactaggcttcatcctgttccttcccgagagaacagaggagaacccagatatgcagaagagagtaaaaatgatgggcagaactggaaagcagccccttggcagttggtatccaaagtgaacatgattcctttccaaagcagcgtccaaccacgagtagaggacaccagcaaagccgtcgcccttggctggaactggagggctgctccttactctgaactgcagygacttgagtgcatacacccaccgtggcttcctggagtctgctgatctgtcctggcccagccatgtggccctttgctgaggttctgatgtgaccgcctgggcatttcgctaactcctttcctggctgttggctttcagcacagcaacatgtaaagaaaggaaagatccctcttcttcatctggactttcgatgtctgttaaaaatcagagaaaacacaaaaaggaaaacaaaagtaaaataagtaaataaataaagcgctgcccaggttagaaaaggcagggcttggggaaatgtttaaaatctctctgttgataaaacctctagtggattattaagcagcaaaagtgggtgggggagggcagttgagtaaggctgtgtctcctccttaggccattgtagaaggattctggctgtcattccatctagaagcaccaaaaatttcacaaatgaatcatgacctttcattcgtttgagtcttctcacatgatatttggaccccccatcaaataccttcttccctccttttctgcctgcctaacacctttcaattcttcaaaacctagagcagatttccaagagggacccatgaccaagtccagttagatgcccccttttatgtgtctctagtgcaccatgctacacattcttcctacttacatttattgagtacctactatgtgccagacactgttacagttactagaaatactgaaccaaaccagattccattctaatggagtgaaggacagtaaacacctaaacaatttatatatgtccagaaaaattaagcaggagagtagtaataatgggagaatgcaggtagtaataatgagtgagtgtggtcaaggatggtttttttgttttttgtttgtttttttgtttttgtttttgtttttgttttgtttttttgagacaaagtcttgctctgtcacccaggctggagtgcagtggtggatcctggctcatgcaacctctccctcccagttcgagctattctcgtgtctcagcctcctgagtagctgggattacaggcacacgccaccacacccagctaatttttgtattattagtagagacagagttttcaatgttggccaggctagttgtggtgacctcaggtgatctgcctgcctcagcctcccaaactgcttggattacaggtgtgagccaccacacctggccaaggatggggtttttaatatgagatatgagcaaaggcctaaagaaagtgagggatgatctatgtgtatatctgtagaaaggatagtctaggccaggattggtgtcaaagtctctgtaaaaactctcaggtgagtgtgtgctggaagtcatcagggccaagcaaggaggctgatgtgtgtgggctgggctggaaaggggtgaccacaggtcatactagtatgcccattttacaaatgagaaaattgaagctcaagaatctagagccaattgccaaaggtcacagccaatagataacagaatcgggagtcaaacttaggtcttctgactctaagctctgtgcttttctgccctattaaagtagcttggtattaagtagtcttcaggtataagtggaaggtagagagcagagagtatccaggaccagattatccagaaccttgtgaggacttcagattttacactgagtgaaatgagaagccactgaggagctctgagcagaggagtgacatgttctgacttcagtttttacaagttcttcctgacccctggatgtagactagactggatgggagtgaatgtaaaagcaggaaagccaattaggaggctattcaaattagttctggggagagctggtaatcatttggaccaagggagcagctgcggggagacgacaaatgatcagattcatgatgtatttgagagtaaagctggcatgatttgcagatagatggactgcaagatataagagaaactgaggagtcagtgatgattccaaggtttagtggatggtcgttcaatattgactttccctctttccacctgtccatggcacttggcctacttcaaggtggttagggattcacctgtctctatttcctttttaactgtgggctcccatgaagggaaggagctttttcatttggtttcatctacccagcatctagcacctgaatatccagcacttagcatctagtacctggcattgcacaataaatattgggagggagggagggagggaagggaggaaggaaaggaaggaaggaaggaagggagggagggagggaggaaggaagggagagagggagggagggagggagggagggagggagggagggaggaattaagggagggagggagcatggatctttgaagaaattaatcagctacagctcttctactaaggagttccacctggggtaacaatcctcaagatttctactggatttgctatccaaaataaatcactgctcagttattctaccaaaaagaaacacttctgcatccagtttgtggtaagaataataactgatgtacaagttagatgcaatgtattatctaacataaccctcacactaattctgggacgtgctctaaatgagtagatactagtatgcccattttacaaatgagaaaattgaagctcaagaatctagagccaattgccaaaggtcacagccaatagataacagaatcgggagtcaaacttaggtcttctgactctaagctctgtgcttttctgccctattaaagtagcttggtattaagtagtcttcaggtataagtggaaattttcaaatatgattcagaatacaggaaatgggtttgtgcgtcagagatttcatctagacatgagaaagaactttctcaataaaaagactatctgatagaaagagagaacaggttcaaactaggagcttaactttgtacaggaaaatcggcgggcgggggggggggggtaggggaatccccaggtttataaaacaagttcattgccttcagaagattataccccatgagtcatccgacaaacattgactgaatacccactgtgtgtcagttggggaggttcactgtacatgcacaagaaaagaacgcattggagtgggaaattgtgtaggtgcaaacaacattytaagaactcacagttgaagggggtattaccygggggsggggggcggsgctcaggttcatgttctggagtcagacttcttgggttcaaattctggcaacttgcaagctgtggaacttgggacaagtcatttaacctctctgtgcctcatmtacattacaggaacaatggcagtaacagcctcatcaggttcttataatgattaagtgaraaaatgtatatgggaactcagcacagagtaaaccctcaaacaaggacagacagagacagagacaaagggagagacagagagggggataaacaaagaggaacagtcagacagagacagagaaatcgagaaacagagggagagaaagacagagacagagagcatacatttcccagtagggagcaggatttgagtagagctctggaggctgagtctggaggcaacaggaagagaggggagagttattcactggactggaagcccctccgtgttctaggctctggcccagctggaaagagaatcccacctgcactacttcctcttagaagaaatatgagcacaggctttggggccttgggaaactgctggaaagttactttatttttaggctgcaaatctgctaggtgacttcagaaggtgaccacatttcagttccattagctcatcagcagtttcttaatgaggctaattagccccaaacagctcccatccctgcagggctctgccaagagcttggttttgtgtaagccagcgagcctgtgacctctgtcagtggctaagaggcctgtttcctgggcataatttcatcaaagcttaatgcttcaagacatctcatagtaagggtttgtggtgccatggatctcgggagccaccaaggtgaggatcagctctgtggccaggaaggaggctgccccaagtgcagattaaatcaagtggccaataccaacgcttgaccagaaagaaggcatccacaagagatctaactcaggaagtttaaagtgtatatggatggtttcctcagtacccacacttgctgacaccagcacacaaaataaatacatatttaaattcacatttagtaattccaagcaagagacctaaactagcagtgattttctaagatgctgtttttctcaattataaaactgggcagatagccatggttgcttatgacttgtttttttagcatcctttttatggacctcaggatgatacatcacagcctctttcctgccccatgagtaaattgtacaaaggaggcttttgatgtgggagccttatgttgggcagctaaaacagtaactatgataacagctgcatttatagtgttactacatgccagggacttcattacatgctttatccacatcatcttacttaacctcttgacacccgtgaggtaagggctattattattcttgttttacacatggagaagctaagaatctgcaggagggaaataaaagagcccaatatcccatggtttgtcagtggcagaggcaccatggaaacccaggtctttctgaagccaaagctggtgaatttaatgttgcacatctaccctgaaagaaaaggaacacattaggtgtgacttctgcactcagagaaccatcatcacgaaagcgatccctccttcaggagtcagtgaagtagtgtggagaacacagggccctaggaaccaaggatcagagttctagtctcagctcatacttcctaggaggcacaaagcaaatccttttgcctccctagatgcttgtttcttcaacagctaaaagaagggttggtttagaaagatgtaatgccagcgttggaagggcatttaggacatcattctacgatgtgctgcggtaatacaagcaaataagatatacttaaataaaaagagtcagatgctaattttggcagctgtcagttttgtgaatattgcaaagaaaaataactttcttttagtgcagacttaaaaaagaaagatttactcagctaacttatttcctttcttatttaaatgagttcccaattacaaagtgaggtaagataaggattacaattctgtcgtgacagttgaatggagtgaggctcagagaggttaagtgacttacttaggatcacacagcaattcaacagcagagataaacaagggttgacttgtatcacttgaaagaccattctggcagcagccttgtcacagctatacttggcaaacacatacactacacaaaggcagtcagatgatgatactaacagcagtgaaaatgatggagaaagcaatgttgggttgtatagactgctggacatggaatcaagctaggttacaattccagctctgccacttactaattacaccacggtgggcaaattctttgactatgcttgtctttatatggtagtttccttcctatattcccttaacccctctgtgactcagtttccttatctgtagactgggcgtgagcatatcttctgcactgctacctaccgatatgaagggatgtaccactgcaaagatatgggacaaaccagctttggtcttctgccccatgcatgccttctagatctgaggatgtcggcctacctcatcaaaggaaacaaacccatgtatgcatcgatacagttaactagttcaagcaagtgacaaaggggctacaggttctggctttaaattcagttggcccagtgttcgtaggtggcaggcatgctgtgtgttcccttgtgcccagcttcaggcatcccactgagcctgaggagggtagcatcctcccaggctttttatctgcataaagagtctgccatgcatccctccccaccatcacttacaggagaaaagtaaggcctagggcagaggttggcaaactttctcttaaagagacaaatattttagacttgcagatcataggatctctgtctcaactactcaactctgctatgaaagcaggcacagacaatatgtaaaccaatgggtgtggctgcattccagtgaaactttatttacaaaaacatgtggatggtagtttgttgacctctggcttggggaaaaagcagccccacttgatgatccataaaaaacccttcatctgttgtgcatttccataccagttctcccatttactcctcccagccatcctgtgtggataagattctttctaagagcaagtttggaagccaaagctcagaacaattaaagggtttggcaaggttaattacagccagtcaggatgggctaatggctttaacaaacatctccaatatctcagtagataacacaagaaaggcttattccttgcttatactatagcccaatgtgggatgacaggactttggtggaagggaggactctgctccatgcagtcatccaggaaccaagctccttccaccaagagcagcaactcaatatttttgtgccgtggtcctctttgacagtctggtgtggctatggacccttctctgaataatgtttgtaattgaataaaatatacaacaaatttgtaatatggtaatatgtgtgcttctgtatcaatgcattataaaacaagatctttcagctgctccaataactgctataattacaaagtagtgatgagtaaaaataatattttgagatagttgatgtaataagtatttctgatttgtattagaaaattagttgtggataccaataacactacaatagttggtgcttacattcataatgaaaaaaatgctttcaattagaggttagtgacaataaagaggccatttttcatggaaagcagtttggaggttcctccaaaaaactaaaaacagagctaccatatgatccagcaatcccactgctgggtatatacccaaaagaaaggaagtcagtatattgaagaaatatctggactcccatatctattgcagcactgttcacaatagctaagatttggagcaacctaagtgtccatcagcagatgactggataaagaaaatgtggcacacatacatagtgtagtactattcagccatgaaaaataatgcagtcctgtcaattgcaccaacatggatggaatggaagatcattatgtgaggtgaaataagtcaggcacagacaaacattgcatgtcctcacttatttgtgtgatctaaaagtcaaaacaattaaactcagagagtaaaagagtgattaccagaagctggaaagggtagcagggggccggggggaggtggagatggttaatgggtacaaaaaaattagaaagaatgaacaagatctactatttgatagcacaacagggtaactttggtcaataaaaatttaattgtatacattaaaataactacaagagtgtagttgggttgtttgtaacacaaaggataaatgtttgaggaggtggatacgccattctccatgatgtgcttatttcacattgcaagcctgtatcaaaacatctcgtgtatcccattatatttatatatttttatacacacacacacacacacactgtgtacctgcaaaacttaaaaataaatttttaaagaggacattttttctctctcaaattccagtatccactgacctcttggggatctagggacttaagtttaagaactcctgattcattatctcagtcagatttcagaattctcccctggattttaccggcagatggtaaaaaggagcatggatggaaggtctcatggatggcttaggggcctgatcatttcacctgcagctcactgccaggcactaagtgacaggactctaccaatccatggtaagaggcagggaggagttcactgtatgaattttatctgtaccaggaattagaggagaactatgtggcagtgagccccagaagtctttctcactctggtgaagcagggcttgaacactgactctcaggcaacggaacaatgctgtcttcagtaatccaagctgcctcaataattggacacgcaacccaaaccatctcacttcctttagtccagggtttcttcacatcagcacttttgataattgtgcaggataattctttgttgtagaaggctttcccttgtaccatagggcattcatcatcatccctggcctctgcttactagatgccagtagcacccacctggggtgacagccaaaaatgtccccagatactttcaaaygtccccaggcaggaggcgggggtggagctgcttctagatgagcactgctgttttagtctctttacctaattgttggtgtttagtactgtctctggaatgttcaacgcaactcagaaagaaaagccaacaagacaccagaaatttcactacacctttccctgaactcccacccctgtacctttggccggatgtttaagagagacaagagagaatctgggccagctacacagtgatgtgaaatttgctcagtacaggtaacttagcatttcattggcaacaagtggaatttaatgggggttggagtggttgcccagctccactgagcaaaaacagctaggaaactgaacaaaaaaggttgttaaatttgttatggacagagggctgtaaaatgtttcacattgactcagaaacagaagaactggttttgccaggcacatgaccttgatcaaattgcttagtcttgattatactaagggttccatggaacaggagcaccagaaaacctagttttatgaaatattaataggtgttcagagaaagcagtttctctttcatggttatatgtttcagcaaacatatttaaacaaaattaagcaggtttccttaccgcaggacttacaacagcctttaatttgccttgcccttttttctaagtaggcaacatagcatttcccactcgtacatttcttcatagagtatcttgagggactaatattttcccaaaacacattttatataaaatgcctctggagcctctaggcctcaatttcttcacactcccactggagtagtaacatttgccttagcgaccttccagagctgttggaagaagagattaagaagacacttgagaaagtgctttgtaaactctgaagagttataaaagtttaagaggtcattattaatgcatatttattaataatttaatactaataaaattttgcccaccttacttcaatgttgagttaatgaatgtgacaattgaagtaactgaggccycaagaggttaaggtcttgccgaagatcatgcagctagaaatgaagtcacagaccagattaattaaaatgacaaataccaaagcactctgagctctggaaaagcactctctgcaatgtcagtgggttctgtccttggcatggttatgattttgactgtagcaggaaacaaggcagtagaaaattaaacagtggcataagccacctgagagcttggaaacattgaagaaagagtgctagatttagggtcagagctaggcttgagccctctgcatttgacttgaccttttgagcctttattctcctatctacaaagtaggaattttttttataatacctgcttcccatgagtggttggaaaagccggtatatcctatgggacattaggattctagtgtgggagtggagccattcggaggggaaagctttcaccctcactgtgtaattgcacacagctttatcgagaatccactaaagctccagctctctctcatgggcaggtcccttcacagaaggcaagagaagcaggtggaatgatcctagaccttcaggtgaaacatgcaaacaaccatggaaaataacactgaccttagggtcacctgagagtgagttactggagttctgaacagggcctgatcatctgaaagtgctccatgggggaggaggggcatgtgctgaccacttcttatttcacatgtaagcacaggcgtggccccttacagcagcctgggtgaatggggcaggccagcgcctgatggaagccaacggatttatgccaagactgcagcaatttaaaaacctgcaccgtaggtgtgcagtactgaagctccacgttctgatataatggcacaattatgtctcagcattgatgcagtgctttatgcttttgaagtgttttacaaccattaattacctggactattaatgtgccagataccatcactagaggaagctgcttccttcagagcacagtgcttttgttcctctcctggtggtataatttttaatctgttatctatgaccctcttttctattcaccttgtgctttttctgttcactctgtgcttcttctattatccgatttagtccaagtgaaattttaatgccaattgaactttttaaagtaaataaataacctgatcatgtgtatttctaaacagaccctgacataaaaggaaggctcacctattgtgactgttctcttagttgaaaatggggagctatttgggagatggttaagcaggtcccctcatcctgatggctctcatcagtactccaagagtgctgtcagcaatcctcccctgagctatttcttgcctttccttgtactcaagccatagacaggcaatcagcctgagagcaggtgggactcaggacagcattacaaaaggatatctcagtgcccaaagataggactccttagacaaagaaaatctgatgcttatactttttataccagagggcaggagaagagtttagataattaatttccttctccatcaattaccttatcacctaaacatttcttgaatccatccagagatctccagctttgctctcaatatcttcttcaaggcctcaacatccrtggattagtgtagccagtggggtgctagtaaatgtttaccaatcaactggagaaagcacagcagaagccttggtttgtagtgtttgccaatttcagtggtgtaaatattttcactatggtgaatttcacagcaacatgatgacactaaacatgggattggaaacagatgcacagtaggacaccattttatgctatctctaccatatagatgcaaccaatgctaatgtactccagaaaaaaacgtaaaattatgaaaagaattagtaaacgtattaccgttgtttttaatatctttaaatgtcttcaattataagtttatataacttaatttgtagtagtgctaggtttaatacttggcttgcaaaattcctaaaaatttggcaatcagcatgagctggtacaggtgggcttccgcatattagtgactgcagcaaccttttagcggtgccattgccttccagacaaaggcaggaacacatctgctgttgaacaggttgagtgtattgctgtttctatgagggacaatgcatagtgtgagatatcatgaggcatatcagcaagaggtgctaggagggacttacaggattcagatttagatactttggaggacagttcaaggaagcagggcttcactctggactgtgtgctgtcaggaaatggggctagttctaagattgcatatcctagtaaatcttatctacacagctggaagaatgcagcagggttaaaactgtaattagtaaaccattactaataaatcatagtaaatcatgctactataaagacacatgcacacatatgtttattgcrgcactattcacaatagcaaagacttggaaccaacccaaatgtccatcaatgatagactggattaagaaaatgtggcacatatacaccatggaatactatgcagccatacaaaaggatgagttcatgtccttttcagggacatgaatgaagctggaaaccatcattctcagcaagctatcacaaggacagagaactaaacaccacatgttctcactcataggtggaaactgaacaatgagattacttggacacagggtggggaacatcacacactggggcctgtcgggagggggctggagtagggatagcattaggagaaatacctaatgtaaatgatgagttgatgggtacagcaaaccaacatgacacatgtatacctatgtatcaaacctgcacgttgtgcacatgtaccctagaacttaaagtataataaaaaaatcagccactcatattagccaagaaaggggactgtttggtcatttttatagtgtggatgatgttcatgctttttgtttgcattcagaattttttttttttttttttcgagatggagtctgtcatccaggctggagtgcagtggcacaaccttggctcactgcaacctctccctcctgggttcmagcgattctccgacctcagcctcccgactagctgggattacaggcacccaccaccatgcccggctaatttttgtattttcagtacagacgtggtttcgccatgttggccaggctggtctcaaactcctgacctcaggtaatctgccatgctgggattacaggcgtaagccacygtgcccaacctgtgttcagaaattattatagggtgatcttgttttttgacttgacccattggaattgcagtggccttgtctggtgtggttggagaaaatatttattttgatcaagcaagcatcaagtcctggctgatagtcccagcccagctcctggagggtaaggggccactttttctcaacagggaacctcatccccaatcttgtgtcaccctaatgtgtctttccatactgctgaatttttttaaatgctgatttgatcatgtcatatctccacttacaaactctccaattgatctcctttgtccttcaaataaaatggaagcttccggggcttcttcttgagctgcatctttaggcaagtcctgcctgacacttcccagctcctctgcatagcacgtttcaccaccattgtctgcctgtgccttggaatgcccttcctctcttccctcagccctctcgctcttgccctgattccatacagaacttgctcatactttaaggcccatctcactgccaccttctgcaggaagccttctctgacatccatgccccattcctgtccaggctagaaacccttcttggtgctccaaaaaaatcacttaattaactcaataaatatttagtgaatgttttctttttcaagctttgtttgaggatctaagaattcagctagaaatcagacagacatggttcctgctttcttggattttatattctaatgaaaagagataagcaatcacttttgtttaaaagtgacaaactgagaaacataaccaatgttgatcaatattctgtatagatttaagattggggtctatgggaaatgactggatgactactacagaccgggtctttctgcagaggtgacaatttgaggctgaaagctaaatgacagcattctgtcccatgttttggcctcatgatctgattatggacccatttcccttccaagatggatgatggcttatatgtatcacttcattccttgcccccaaccaaatatagatgtttaatgaatatctgaggaatcaaaggccagctctttgtcattccttattgcagcccctgcattatatttgacataattcactggactcagttgtgattcactgaaggaaaatcacccccaacctcaacccagcacatccttcccttctgcaccccagcaccatgatcatggggtcattctcacctgcctgctgttaatatcttccccgatatgtccacatatctaaatcttacccactataaagcccagtgaggtcctccattgttcaggaaagctttgccagctactgaggagtttgtcagtcctgcagcatccgtcgtctgtatcatatgatggtcctcgataccaggatgttgcagagaagctgctggatrtgctacaaagagcatgttagtaaagcccaagagatcttaatttaaatcctggctctagcactgtccttctgtgggacagagacaagtcatttaacctttctgaatctgttttttgcatctcttctgtgggcaagcttccttgagataaagggctatacttttcttaggtataataattttggtataaatgacatatagccacaatgttggtatgttacttatctttgtaaccccagcattgaacacagtgcctgacacataataggtgtttagaaatgyctgtggaataaatgaatgggaatgatcacatctaccttcatcagggagtgtttatgagaaaactgatttcaagggtctaataagcaataggtcaaaataaactgttttcattcttacattagcctctattttttccctatcacttttgttccttttatttgcatcattgtattttttttttttatttaggtctcatagtgctatgagaagatctagatgccaagtcagggcttaataaacttcagtttactgatttaaagctataaagttattagtaatatgagaaactcaatagctttgaaaaacagaatacatttagaaaggaagccttaaagatattgaaaatgaattttgtttgtcttcaaagatgtcatttttgaaattataaatatagtgcatattctttaaagtaaatttgggaaatacagaaaagtaggaaaataacaatatactctagttctcctacctaaacgtaatcattgttgacatttagtatactttacttttagacatgtgtaattttgcttagttgagacatgctatatggacaattttgctcgctttttccacttacaatattatangcactttccaagctattgttgtattttaatggctgcattatattmcatctagcagatgcattatagttcacttgagcctttcctgtcattggtcatttatttgctttctattagcttctattgtaaataatagcagtaagcttttctagggacaaggagtcttgccctaaaacaaaacaaaatcaaaagttcaagaaacagagatgcagatgtacatttgaaattgcctgtagaacttttggatgggtaaacaagaaaaaggaaaaaaagctatacgtactgctaaaaggaaaataaaatttcttagatccaaactctattggtataggttgaaaagtcagagaaagaggatttcagaagttaattaggaaataacaagcaaattgagtaaattgcctaatttaaacccattagataaacatttattgcaatacaaaatcttgatgactgtaattaacacatttataaactctctaagaaactttaaaacctttcttcaattgactgaaaaccagcagctttttcaagcagagcttatggctaggctgacatgttccctgggctgtgagattggtcagcaaattccctaagcctaatattcttaaacctggtcttacctctcagatctgtagtgagaacaatgggatatgacagtggaaactttatttttcattcattacatctattgaggtataacttgcatttagaaatgcacacagatcttaagaggatatattggcagatttttatccatgttgatacccctatgttacctccaccagatccagacacagaacattcccagcaccctgcaaggttccactaatgytccccatcagccatagccgctggcactattaagacctcaatcactattttgcctgttcttgaatttcacataagtgaaatcatgtagtctggactctttttttgtctgacttcttttgcacatcattgtatctgttaagatttacccatgtttgttttgtgaagcagtagttcattctttttcactgctgtgtaatattccatgttgtcaccataccgcaatgtaagcactcattctaccacttaggaaggtttttgttatttctattttgcgctattattaaaaaaggtggcatgaacatttttatgtcttttggtggacaacagatataagcatttaagtgttctacaaattagtggtgagaaaacagatctaagagctagaggacctaagttcttgttggagttctgccatttcctagttgtgtgattttagacaaatcatttcatgtcactggttctaaatttccttaacaataaaatgaataagggcttttcactctgagaatgcatggccttctgactaaatacctgtgtaacctgaaagaaagtcctttcatttctgtgggcctcagtttcattatctataaaataaagcagcgaaagcaaatgctctccagggtctcctccagctgcaaattccatgcttcagaagcgttcaccatggtgtgcctcctagagacaaccattgctttctacagggaaatgcccaagtgtcccagacgtggcatttctttccaagagccactagccaacaaaagaacttggaagcagaaggcacaggtttgcatctcaactaataccttagacatgcactttaatctgccttggttttctcatctgtaaaatggggataatgaaatttgactttcttcccttcaagcctgttacatgatcccctgctccttagcttccttcaacaagaccacagtcactctcaagggaactcttactatcttgttaaaccaggtactagccagcaccacataacataatgcctgttatcttataggtgctcagcaacaatttccccaatgaaggaaagtgctttgaatactatacattattatcacacattatattccttgtgctgatggaattcagtctcaaggtagattcatgtatgcaacatgaaattatgcattgcctattttgtacattaaattatgcttcttgttgtggggattcaaaacataaagcatggtcttgatccttgaagagatgcatcattcaattcaacaaacatttatttcctgaacacctgttactgtaccaggcatagtgccaagtgctagaaatagaaggaaaaacaacatataattcttttttctttctcatttttatttgtttattgtatttcccattaatttacttgttcagtgagatgtttttccccatgcaatccaccaaacgagttgatagcctatgatagacatgtaaacagattattaacgattgcatataattgttggtttaatgaaagtgtaaattsagctctatggaagcaaaagtaggaacactgagaaagcctcccaaaatgggtcacatttaatcaggccttaaagaatgaactgaattcagccacatagaactagtcttctaactgaccttcctgcttccctctttctcctccctctaatatagtctctacaaaactgctcaattctttaaatgaggattgaggtatgtcacactgctatgtaaaaccccttagtgatctcccaatgctcctgggagaaaactcaagctcctcaccataccacaaagctctgaaggttctggaccctgactcttgctctactctcacccttgctcattaagtgcagcggcctcctttctgctcctgggccaagctctttccttcctccaagccctagcctttgctatgccctctgccagagggctcttctacacactgtttgcacagctggtttgttctcatccttcagatctaacttcaccactgtcttcctcatttgctcagtcataaaggtcctcaatccagactacaccaaaaactccctggggaatgaattgtctagaaaaggcaaatctatagaaagaagatcagtggttgcccaggggtgggagtggggagttactgtaaatgggtgggaggaagctttttgggtgatggaaatgttctaaaactgaactatggagatggttgcacaattctgcaatttactaaaaactgtcgaattgtacacttacagtgggtgaattttatggtatgtaaattattcttcaataaaactgtttttaaaaatgttcttggggagtttttaaaatactagaacttggacctcattcccagaaattctgatttgattgatctgagaatggggcccaggcacccataagtttggaagttctccaaaggattctgatgtatagccacagctgagaaccactgccttatcttrtcaccctggttattgccttcacagcactgtaattgtcttcgttactcaattgtttactcagtatttgtccttctcaggaattataataaaatctcccttaagggagagacttttactcaatcacctttgaatccccaatcgctagcacacagtagctgcataatatgtttattaagttaatgaatagaatagtggaagatggaaggaaagccctcactaaggcacagaaacatgaaagaacatggcatgttaacatggcatgcttgccaaacaactgcccagagtggcaaacgtagctggaactaagatgtttctgtgaaaatcatgcagacagtgctgaaagggaccgctgagaccaggcgtcccagcaagacagtcacataaccctgcaaggcaatgtggaaagacctcagactcaggaaatgcaggtgccccacagaggagcccagcaatatggaatggaaagttcaggaaaagtactgtctctcccttccctagttctccaccctcaaagtgggaaaatttgcarttaaggaacttaagaccttctggcaaaaagagggttaaagaaagtgctataaatctatgctttaaaacccttatggttgattttgcattctctaaggtaataaaacaaagacaagttactaaatartaaaatataaatagcatcacatacgtatttaattagtaaaaatgagctagaaagttttcaggccccctcctccattttcagtgggatgtgtgtaactttatttctcctggaaaagcacattcatttgttctctttggtgctctattcaagctgcaagagtgaaaatggaaactaaggcagagtcttagtgaagactgggagtctatattaatagaaacagagacttatttcaataaggggaaaacaaaatgtctgacctgaagtcaaaagttgaccrtgaatgagatacagggagcagtttcaaaagagaagacccaataaataaaaggagagtctagtctgagaggatcttgtggggagagcaaggtaagcaagatgggatggaacttgctcagagctcagtaagcgagcagcattctgtgaagaggatgaaagagaagcattggaaacaaatgcggacagtgataggtcaaaatttatgaatgattggctaattttgtgtggcaggtgttatcaatgactttcttttcttgttctcttttttcctccagattaatttatagaaatttgtattttttaataggcttgacattgaaggagataagtttagaaagcacaaagattgttaaaaatcatcatagataggactaatttaccatttaaatatgtgccaggcaccattctataaactgtataataaataatttattatgcacagtgactctatgagatggacactaattaatatgaagaaactgggggatagagaggtttagcaacttggtcaagatcacacggccagtgagtatccaagtcataccatgaaccaaatagctcagctcctgggcctatgcacttaactactacacaattcatacgaaatacaacgtagaagaaagactctttgattatcattgctttgcctgctttttcttctctgacaaaaggaaagatgctcgattccttgcagctcagtaacttacaggttcactgcggtgaaagtgaaaaccattgaaaagtaaatttaattagttcgctggtaattattgtctgactaaattatactttaaaatttaatattccaatcaccacttaattagcaaactgagtcgtagaggatagccttatgctcctaaactgactaaagctggaacttaaaaatcagcattgtacacatttctccttttcctaaaatgtagtntttctttgcttattccttcacaccacccaaaaaaggtagaaataaaccaacagttttccatgatttcaaaataggcagacatttttttggtggctatattagattgcaagtctaggagagagactgagaagccgggatttggagagaagagggagtaaggagaaagtgtagtctccagctgaggcctggaatgtaggaatgcaggagcgggagatgctgtgggcagagctgtccagtcctgctgctactttgggacagtaaaggctcaggaaaaggaggccccatcgcaggaggatggaaggtagggccacttctgctacagtaatcgctaggcagaaaaccccatccttatcagcttctcaaggcagaaaccccaaacccatctccttgaacagccttcctgcaagatgatcctagttgcgcacaaatcagagagttgaaaactatccattttctgggagatctcaagtgatgtcagggaaaataaggaagaaactggtttgctctgtgttagcctaatccccccatttaaacccggagtagcatgttaattctgtagccagaagagtgtcttgtcataactggcagggtcctgagattttggaatatgagtcttgctgtctgctactccgcacttaatgtcaacgagatgactgttttattacttctgggaaagaaatggggcacttaaatacaggcagattcagcagagcctggaagcagatagagcttgactccttggaagtaggtacaggttgcagagctgttggctgttagatatcatggcttaatgagtatggcatggacatggcaaggcccttcctcaccacagctgtcagtgtcatytgcacatgaagtggaggtggggacactytggggacatccctagccatytgcccctcaggstgaatccagactcagcaaccttcctcccaacttcaggattaattcccagatgtcctttttytcaaatgtagggagtgsttctggktgkttttttttttttttttttttttcagacatcaggcacaaatgatccaagcagagcctgcagagtacattagactcggtctgaaggcackagcctgaggggaaagaatttccccatgtgaaaagtgtctttcttctacagattccaggtattgactctgccaggcatttatgaagatcacatgagttagacaaagcctttttggagagtgcatggcagagtgagctctttcccacttggcaaatgagaaaatggaagttcagggagattacataaattgctccactatcatgtgatgaaaaacagaaccaggatggaaaccaggtgtgcctgattccaaatcattccctgctaggatactgtctccctgagaggaaattaatgagacatagtgtaacaggcagaactcaactctaccccaagccctagctaaatccatagataggcatgatcagtaatagttggctttccacctgaagttctaaagcagcctcagaatcattcacagggtatgccaagcagtcactttccaccacttggaacccagatgaagaataatgctatttgccgtctctcagtcatgatacccaactgtaggcatctagaccacaccctgcacctccttcccaggaagcttcttcagttggggtctatcagtaattgttctctgagcagtgtcttcggtaatgaaattgagacttcaaaaagaaaatcttacatgtgtcaaatacaagaaccactatgggaattacacaacttacgcaccatgatcaaagacttcctggtgtcactgggttagatccctatcataaaacatgggttgtctggcactagaatgccttcttcttactgcactataattttcatgaagttctgctctacacctggaatcatccagaacaaaatgccagcggaagagaactgtagtgatgtagacacagcatctaccacactgcttactcttctttctagatttcgtttctgaggaaggtatctgatcacacttttttttttcattgtctgtccccacagaacaattctacagcccatataagattcacgtatatggaagacaaaactgaagagcctgtttttttttaatttttttcctctagtgtgaaaattagaaagcacactcacgctgttaagaaagcccatgacagcctgccaacaatgaagctactgtcttatctttcctagatgatacttgtaaattgcaagagggagaaaataattctccccagtccccaagggcgactggagatttactgacgaccacaagttggatgggtggacctttcatgcatcctattgtccgttagtcaacagctctgactactcctcacccaaacgaaagtgaacatgtgtgtggttttacactctcttctctgtggaagctgccactggggaccagatgtctcttgccacgacaaagcactttccttgtttatcctcatcacatcccatcataggagagagagaagatgcttgaagggtttgggaggcagaagtgacctccagtccctgagggaaaggcaggtccattccacactcagagatccatgcctacaaaaacacaagagattctcaggcagaccaggcactcctaggatagagctgtaaggggaatgacagagcaccaggtaggaccagagagggcaagtacttcttctgggcccacctgccgaatttgatgaaggctgggagtcaaaggtggatacccccaaaatccattaatctaggaaagatatctgagcctaaaaatggaatctgaagacagaaagatctactcagttgaatagatttaacttcagatgctatttcttcaacacatgccataattcattgattctaatatacattttccatattttaacatcttcaaaattaagatatgtcttataattgatgatctgtcatagttaacttggtaatgtttttcttgttgtatattaaataatggtgtctcttacaatctatagcatcatagattttatgaagtatggttaacttagccaaggttgtaaggtactgtgctgagtaactttaaaggarttatctcatttggttcttgtttttttatagaaggtttattgagacaccataaaattcttccatttcaggtgtataatttaatgttttttttgtacatccacagagttgtgcaaccaccaccatgatcaattttcaaacattttaatcactccattaagaaatgcattagaagtcacccccatttccctctgacccacccagacttagacaaccactaatctactttctagctctatagattgcctattatagacattttacataaatggaatcatacgtagccgtttgtgtctgttttcctgcatttaacgtaatgttttcaaggttcattcatgttgtagcatgtaccggtacttcattcctttctgtgtctgaataatatttcattatatgagtctactacattttattttctactaatcagttgatgaacatccaggttgttttcaccctttggctattatgactaatgatgttatgaacatttgtgtggacatacatttttatttctcttgggcatatacctaggagtggaagtgttgtatcaaaaggtaactctatgyttaactttttgaggaacttccaaactgttttctaaagtggctgcaccaacatacatttctccaagcagtctatgaggcttccagtttctccgcatcctcatcaacacttgtcatcatctgacttttttatttcaaccaccctagtgggaatgaaatggcatctcactgtgggtttaacttgctttaccctgatcattattaatgtgaccattctttttatgtgcctatgagacatttgtatatcttctttggataatatactcagtttttgcaacaaacttttattgagcctttaccctagtctagtcatgtaagagacttatttcatcaaaggccctaattatttactgtattctattttcatactctttgccacataatttggtagcactctctccttttgaccctgaacttagccacatgacttgctgtggccaaggaaatgttaggatattgtacccaggggagtctgttggaggatgagattcatggtggagagccaagttgccccatcatcccaacaaagaccatgctagatcagccaacagccagtaaatccccagatagatgagcaaacaaagtgagtttagcagagctgcctagatgacttacagataaccacagaaacatgagcaaatccagctaaaatcaccagaacctcaaagacttataaactaaataaattgttatctgccactgggggtttatggttatttattttgcagcattgttaaggaactaaataactgatataagacagtgtcttaaatactgaggataaaaagatgaaagaagtgattcatgccttccaagaaccatattgaattggggaaagcagaaaagtaccagcaagtggtactttgctgtgttgcaaaagacatttggacactcctttgaccaagtagctatgactgcccatttttcagaagaaagctttcagagtttgtgggacaaaacttcctagctactccccactgtttccccaccctgtgcatttgactggctccccttgatgttcactgcaatgtatcctgtacccacatcatgttcttcctggagccattaaaaatgtttggtgatgcgcagagttggcataaaattttaattatgaatcttggttrcccaaattagtgtactagcataactttaattaaaacttactgctttatattcctctcaagtcctgccctgataaaatgttttattatccctccaagtctgcgtcttcagccttctctgacttctcttgccttttccttgaggccttttgggttggccatacttgtgcttcccactagtgacaatgcaactttaaaccaatttaaaaaaattctcaagctgcattagcttttatgatcgtgttttctatcttgacattttatcaatcattttcactatgcctggcacagttagatgtgccaaaaaggagtaacttaagctgcatctctcaagtaaaattatttttgtattttttttgtgtgtgttctaaaccatctccttcaaaccagtagcctcttattagggatattgtaaaccagaagttttagccattttagggatgtagataaatgccattgggcatgtatgaaagttacagaatttcttgcctgaaacagacacagatgcacatgcacaacagtattcatacattttcagaggctgatctctaaagctttagggtcttcctagcgccttgaggtgcccacctaaataacgtagaaggaacctgagcttctataaggaaggaggattacatatttttgatcaataaatgtgcttgcccagccaaatgtccatgtgttgtattatgaatatagaaaaataggaaggaagctgtggccatcattaagggacagggcatgtgcattgtgcgaaggagcaaaacaaaagaggygaaggcatttatttctagtctcgtagtcccatttctgtcagggctttgcttaaggcaagtcacttcctctcccagagccactgtgtcctcttcaataaaaactacagggaggggtggatatttgaactgtgatcagtagcccctagatgctagtcgtggatgtgtggtagattagctactcttgtcaaatatagatttcgttctttttttttttttttttttttttttgagatggagccttgctctgtcacccaggcaggtgtgcagtggcgcaatctccgctcactgcaacctctgcctcctaggttcaagtaattctcctgcctcagcctgagtagctgggattacaggcgcatgccaccatgcccggctaatttttgtatttttaatagagatggggtttcaccatgttggtcaggctggtctcgaaatcctgacctcgtgatccgcctgcctcagcttcccaaagtgctgggattacaggtgtgagccactgcgcctggcctcttcctttctttttaagggagtggaggggtttacctcttgataattctgattcagtatgccaggggtggtggggcctgggagtctgtgatttctaaatgcccccaagatggtcagtaggcatagtcaagtttaagaacgactggattcaatgatcctcaggtcaggtcacctcatgagttagtggagggcggggtgtgygtgtgtgcgtgcacgcgtgcgtgcgcgcgcatgygcctgcgtgctatgatttagaacaagatagagtttgaagcctgaccgtgggaagtccacagaaacagcagcacactgtactgtgtggacaactggatatcctttttcatgctgctttaatgccctcagtgcctatttcatgtccaagttggctgtgtcatccaccaaccgctggagctacccatgacaaggctgcctgcctctctgatgctggagatgcactctggagctgtgcaaaggctctcttggtccatcttccttctgatgggcagctgttctggcagaaacagctggcagatggtctgtggctagaaatctaagtgtgtatgagatgcttctggcagtaaaaaggaggcctttaaagatgagaataatgactgaataattgttagggaggtcaccckaacaattatcctcatctttaaagacacctattctatagtttatagaagaaaatgccaatgtctctaattgctgtgggagctggctttgctgtgacctctccaggccttgtgggtggtctgtgtgaaagtagagggctccttgcatggatgcaagcgggcttagcaatggacaagactacagggagttggagaggaagaggatgaaatgacagatgttacattaaagttaggagaatgacttccctcatttgaagagttccagacaccctaactataggtagagaagcccagagcaatacaattttgtgactattgttgtggacttacatttaacccaaagttaaagtgctctaggattcatgagttttactcaaattacctaaaaaagtactaagactagggagtaataggtctactaatctgttttgttgactcaatctcttccctatctcccccaccccatagaatatagatttctctgcacaatggcctagaatggcctcaggacagtgcagacaggacacttgaacttgcaatccctgggggtgaggggagcacactggccttctttgaagtctttgcacactgcagtagaaatggcactgggtctatgatagggcaggtgatctaggtcaggctttctcattaacttccatgagatcgcagacaaggcacttccccttttctgggcctcagtggtcgcctctaaaaaaaaagaacaggattggaacacagactctgtacaatgctttccatcggtaacatctaactccatgttaggggtcctcgggtggcgttaggaaagaaggtgaaggaccaggtcatcacagagatgtcagcaaaaacactggatgaaaaatcagcacccccaggttccagtctcactgctgctatttactagaaacctctgtctcattccagactgcaagccccgttctataaaataaagctcctgatcaatagctctgctttctgtgccttttttatgccatgattttcttgtgctttgaattctctctcacttcaatctacccacaaaatctatttttggaaagcagggagatttgacacatttggaagcattagtatgtggacactcacacctattccttcctacaactgcccaggacactgatgccctgtgaccaccacgagtgaggatgaaggccatgcagaggtcaccttgtgcctccctggggtcagccctgagctctgtcagcactggacagatctgtgagaaattatttttagtaaaggcacttgggtcctttacctcctggaggaagtgatgccaagaaacacagacctgcaccaaaggcacctttgttctgttaatataaaacaaaacctcagtcacccacaattcttgtagccactgtattctgagtcattaaatcttctggttgactatgtggcaaatactttttccttttctctggccaaaagcccttccaaaaatrtgtttccttttctctggctaaaaagcccttccaaaaatgtgtttccttttctctggctaaaaagctcttccaaaatgtgtaactccattgctcctctttggtaatcrgaacacattagtgagaacagaattgtgtttagatggctacagttcctggggccttgctgccatcatttcgaatgttggtcctcactgttttatcttatggtgtagatggcaccagagacagctttgagtatggatcaagcccaggaaggtcctcaggaagtgcatttttagaaatgagatctaagaaaataagcatttactaagcaggggctgtatgtcagactctgggccgggtactttacacacattttatcctcccacccacacaatgaagcttcacattggcctttttcagtaaatgaaactgagccatagagaagttaaaacttctggaaaatctggaagtgaacccagsctctttcctgatgccatcctgcattctttgtggtctctttctcccaaagcagaactagcaaaaacagttctgatcaactgagagtcccagataattccctctagttaactaagattttacaataaaccctatttaaagtgaggatttcacatgtttgaaaatcctcaagtatcttgccttacagacatggaaatgcctttggttaaactgcaattactacatttcctgggttgtactctttagtttttaatttctcaactttttcaccccactgtagatttattatatttacctttgaaactctgacaatctctattccagtgctttgcacacaggcccaaaataaatatttgttgaaagaataaggaaattgatgatgttgaatgttatatgtagtgtatatatagatatataacacatgatacttatatggttttatgtctttggtgttatttagtaaatatcatatgattaaattttaaataaaaatagaaccctagttgactaggaggaggagtcttacagcccaatacagagaaattaaaattaatacaatatagtggggtgacacctgccaacccaggggtaaaatgacgtagtctccrcatccacctcaaccacaattagctatrtgaccttcaaccaagcatgtagcctctctgacctcagttttctactggtagaatgaagaaggggcacttccagcagctttctttccagttcttacacccctgtctatacatgggagcatgcaggcagcataatgccctgttaacaggctcatttttgttgttcacaatggaaccagaaaccaactaaaaacacacctttccctcttgtgatattcaagaaattcaaggtgactggtgtaattaacttctctccatgggcctttcgagacccaacgaaaaccctggcaggaaagcagttgttttaatttgcaaatatctgtcctgcctagttcaattcagcttttttccgaacacctacctggcatctgttgactttgcagaggtgggtcccacagtcaccatttgccatttgatgtgttgtgtacaaagagaaaaggactctgaaaagcaaatcctcatcagactgcattggatgtccagaatctgagcatgctcaggcattggaaggcagatggaggcacagcaggtaggtaaatgataaccccacactgaatgcacagttgacaaagaaaggtcagaaatgagatggtaaggaaagaaagcacaaggaacaccaaacatctgtctgaaagacacaagggaaaaraaattgtctctcctctacagataccatgtgggtctctatactaatttaccaatcaacagctgttcagcgattctactgtccattgtgcaggagacaagtttattaccaagctacagcaaatgtctctgcactcaacctctaaccaaacaaactttttgttttatccctccatctgagccaacagtttcaacacaggacaaaacctggtttctgtggggtatccagcctcttgggtgataatgtaataagtttttagcaaattaaagattgtcagggattatcattccagtcttgattcagtttgttgcagtctgtggtccttcctccttttcaacatgtggctaactgataggggcaagcaaataaccctaaacccacccccatcatgtgaaactgcaaccacatggtttccataacatattattttttgtttccttgattttttcccccaatggccattcatacaaaggaagttgtcaggacattcaggcagtgcaagaagttcatagcccagcattctccccattcccctccaccccaagtttatgttaaaccataaagcgaaattttccatttcttgaattcacatgtgaggcatcctgggtcctctgcattggccatagagagagaagaaagatggaacagcatagacagggataatgtgactggagtaatcaacttttctccatggacctcaccacaaccatcaaaattcttagaagaaaagcagttccttaacggtctgcatttctcttctttgctcttgcattaaatatggccaaccttgggcaagttgcttacacccttgaacctctgcttcctctccagtgaaatgcaggcaataatatataccgtatagtcttttggagaatacaaatttatgcgaatttgagataatgttaagatgacaaagagctgtataaacaatattgctctattgctatatagttgtcataagagttaaacaagatattgatcgtctctaaagtttactcacacatgatttatgactcctcactgtataatgcagaccagcctctctactggttgtgttgatcttggtgcttattttcctttcttttctttttcagatgtatgaaagcgtaattaatagctaccggttcatttattttttaaaacaattaacagcatgctaggatgattgttttgcacaaatctagcaactaaggctaggcttctacatgaagcttaattcattaattttgtctttgctttctatctaactgaattgccttttcataatgtaggtattcagacaaacatatgctgccaccaatcttctattgctcaagtactttgaagctgttaaatgatttgattatgcttagctatgatcacatacctcctatttgcaagtgagtttatcaggtcttgtttcaatgcttactgagcctctgtcttgtgcaaaacattgagatggagatggagaagcaacagggattttgaaactaaacagaattggtctctatttctagctccaccatttgctgtcttcattgcttggaggaagttgcttagcctctgtatgcctgttttctctttggtaaaaccgagaaagtaatatccttctcttctatgagaattacctgtgatagctataaagcatctggcataatacctgaacttggagtagacacaatatagcatctctttatttatttctctctcacttgttgtctccttccttcccagccccacccatcatgcatgtttctctgtgcaaagattatataagtgtctattgtcaagagcttaacatctaatagaacagaaatacgcataaagaattttaatacaaatcagaattacataggttctaaaataaaggttcaagcaaagttccatggaaacacagtggaagtggattaatcccaaaaatttgaaaagatttacagggtcttcaaaagctattaaaagaaagaattctatgaatagtaagtgggaaaaatagaacattcacttaggtagttaactcaaaacagctgattccaccacagtaccatgagaaattcatttgtgtctggtcatctgagttggtggcgccacagtgaacatgatgccccagacatggggattcatctccttatggaccacagatgagtttccttagggtcttcgtcattgacagtttccctaaagtgggccagaaagaatggaattgattcaggcaatccaaaaaaattatgttratattctcctgttataatcagttaccaagtctagcacttgcaaggggagaawtcacagggaattttatttaacaaacattagttgaacacccactgtgcaccaggcactctgcattccaatcaaaatgaatatacagatggaatattaattttaactttgtaaatgaagatagaaatatgagnattccttgttatattatcatttgattgcatgaattggttttgaatagaaatttaaaatggggaactgttctattaggtaatattaaactggtacaatagatgagtcatgaaatttggaatgcctagaccttagtctagctcttctatttactaggaggtatgtggcaagagtaccattaccattaccatgcacagagaacaaactatattctgggtacttacataaactcacttatctttccaaaagtgctttgaggtatgtatcttcgttctcattttacaaatgcagaaactaaggctaaatcaagtcaagtaacttgtcccaaatcacatgtcatgtagctggggaagcctggaattaaacctcagtctgtctcacttcaaagtgcatcctcttaagcagtatactgtgctgcttccatgcaagttggctcctgaataagtttccatgcccccaaaacagagataatattgaaggtggtgatgtactgcaaaacactatacagatgttggtcattactttaaagtggcatttagttcattgttaacaaatgttaatatgaatgagatgcacagatggtagaacctttaaaattgatccacctactcatcttaccttgtcatggtaacagaatgaatttgagactaagtttatctggacacacacttaaggccaccaatatattttttattccattgtttttcccagtgtaaagatgagtagacggaatctctgccctcaaggtactcacagctgcttgcatttgcaggcaaataaattgcagttcatttttggtgaattcatgaaaagaaatgtgttcaaggtagacaaatagcagagagaaaagaatgctcactagaactgggaaagtgacaggtcaggagggtgaatcattatggatttgccaaatgcaagaggtataatcccaaccacgtatccattcagccagagatttattaactgcaactcagaggacagttgctacaacaggcatgtcatcctgtttcacgcaggagccaggttccagcagcaggcacattagatctgctgagttcccttctcttcgcatcattgaggcaagttatcatgggcccagctgaacaagggaaatcagaggctcgggctccagcaaagcagcacattaaaccagggtccctggctctggaaactctagtttttgcagatttagaaagctaccactcagagtgagtcctggctccccacttggttagtccaagcatctgatgcacgatggctcctcccatttccagcaaccaaggaggccactaagttagacactgacccagcttcacccagcagagcaaggctggagctggctgctgctggcacaacctgtggactcccgggagggcccttagggtaatgggatgtaagataatgtgactcatacagagaagaggtctagggacatcaccgatcttcatcccttagtgagccatctccacaatatctcctaaggctaagaaccagagtcatttgctgggtttcacaggccccttacaagggtaaaggtgaggtggacctactatcctatgcatggaaaatggaaaatgagtttctaagtgtgagtgtcatgagcacctgtgtatgagcacttggcatgtgaaacaggcttagggaaccattacaggatgaggtcagagaaggcttccccaaggaagggaggatatgttagtcaggtggagtggaggcaagagtgggcagagaaacaggcttcaaaactgagggagtatcatgagcacacactcagaggcagcaggtggtgagctcagggagctgtaaaccatgcagcatgtgctagagtgttgcatgcaaaggaggtggccttggagaagctgctacttgccaggatttgttgatggaacatagaagaaactcatgatgrawtactaagctttcatctataagctgcagctataatctgttagtacacaataaattacaaataaatatagcatcaaagcattaccatgatgtaaatgtctcttattagaaaactgtaattgggccgggcacggtggctcacgcctgtaatcccagcactgtgggaggccagcgtgggtggatctcctgaggtcatragttcgagaccagcctgaccaacgtggtgaaaccccctctctactaaaartacaaaaattagccaggtgtggtggcgcacgcttgtagttcccagctactcaggaggctgaggcaggagaattgcttgaacccaggaggcagaggctgcagtgatccaagctgagatcgcgccactgcactccagcctgggtgattgagagagactctatctcaaaaaaagaaagaaagaaaactgtaattgaaaattaaattgtatgacaaacactatacatgccattgaatgttagaggaaaggaagaaagaaagagtggatttatttagttattctgtaggtgtacattctatctagaggtattgaggtaggtttttatcccaatctttcaggggaggaaactgaggcttgtgggaggcagaagagtaaattactttgcccagaatcacagataattctgtgtagaatcaggactttaatctgtgtctattcacttccaaagctgctgcttttgccttctaagaaccattgaagtgttcaagggaaatcatcctaaaggaggagatatgggactctgtggaaatgctctacagtaggtttgtttgttttttaaagattatttttgctgatacataataattgcacgtatttatggagtgtatgtgatattttgatacatgcatccaatgtgtaatgatcgaatcagggtaattaggatatccaccccctcaaacatttagatggaggtcatcatgttaaatgaaataagctaggcacagaaagacaaatatggtagatatttacagaacatttcacccagtggctgcagaatacacatttgtttcctcagcacttggaccattgtcaatggtagaccatatgttatgacacaaaacaagtcttaaaacattcaaaaaacttgaaatactatcaagcatcttctctggtcataatagaataaaactagaaatcaacaacaagaggaatttcagaaactaaacaaatacatggaaattaaacaatctgcttctgaatgaccagaggatcaataaagaaattcagaaggaaattgaaaaaaatattggagcaaatgataatggaaacacaacatacccaaaagcagcaaaaggagtactaacagggaagtttatggctccaagtgcctgcatcaaaaaagaagaaaaatttcaaataagcaacctaaccatgtatcttaaagaactagaaaagcaagagcaaaccaaccctaaaattagtagaagaaaagaaataataaataacagagcagaaataaatgaaattgaaatgaaaacaatacaaaatatcaatgaaacaaaaagttggatttttgaaaagttaaacaaaatagacaaacttctaggcagactaagaaaaaaagaaaatccgaataaaatcagaaatgaaaaaggagacgttaaaactgataccactgaggccagggggagtggcttacgcctgtaatcctagcactttggaaggcagaggtggatcacttgaggtcaggagttcgagaccagcctgaccaacatggtgaaaccccatctctactaaaaatacacacacacaaatatagccaggcatggtggtgtgcacctgtagtccaatctactcgggaggctgaggcaggagaatcacttgagcctgggaagtggaggttgcagtgagctgagattgtaccactgcactcaagcctgggtgacagagaggagggtgtctcaaaaaaaaaaaggaaaaaaaagaaaaatagaaaaaaccatgatatcagtgaaattcaaaggattattactagctactatgagcaactatatgctaataagttggataatctaggagaaatggaaaaatccctaaacacatacaacctaccaacattgaatcatgaagaaattcaaaggctgaaaagacaaataacaagtaataagataaaagccatagttgaaagtctcccagtaaaagcctggaacctgattggcttcactgctgaatcctactcaaataattccaaaaaatggagaagggaatacttccaagttcattctatgaggccagtattaccctgataccaaaaccagacaaagacacatcaaagaaagacaactgcaggccgatatccctaatgaatattgatgcaaaaatcctcaacaaaatattagcaaaccaaattcaacagtatattagaaagatcatacatcatggccaagtgagattatccctgggatgcaaagatggttcaacctaccaaatcaatcagtrtaatacatcatgtcaacagaatgaaggacaaaaacaatatgattatttccaaaaatgctgaaaaaacattttataaaattcaacattccttcatgataaaaatcctcaaaaaactaggtatagaaagaacgtacctcaccataataaaagctatatatgacagacccacatctagtatcatactgaatggggaaaatctgaaagcccttcctccaagaactggaacataacaagaatgcccacttttcagtaatatgttgagtaatatgttagtactcaatgtttttactcaacatattactggaattcctagcaagagcaatcaggcaagagaaagatataaagggcatccaaattggaaaggaagaagtcaaattatccttgtttgcagatgatatgatctttggtttgttggttgttttgagacagagtctcactctgtcacgcaggctgcagtgcagtggcacaatctcagctcactaaaacctctgcctcccggactcaagtgattcttgtacttcagcctcccaaatagctgggattaaagtcaaacatcaccatgcctgtctaatttttgtatttttcatagagacagtgtttcactgtgttgcctaggctggccttgaactcctaagctcaagtgatctgcctgcctcagcctcccaaagtgctgggattacagccacgagccaatgcgtcctccctgaccttatatttggaaaagcctaaagaccacacacacacacacacacacacacacagacacacaaagatgttagaacgcattaaaaaatcagtaaagtagaaggatacaaaatcaacatacaaaaatcagtagcatttctatatgccaacaatgaacaatctgaaaaagaaatcaaaaaagtaatcttatttacaatagccacaaataaaattaaatacctaggaatttaaataccaaataagtgaaagatctctataacgaaaacaataaaacactgatgaaagaaactgaagaggacaccaaaaaaatggaaagtggaaagatattccatgttcatggattggaagactccatattgttacaatgtccatactgcccaaggcaatctacagattcaatgtgatccctattaaaataccaatggcattctttacagaaatagaaaaaataatccttaaatttatatggaaccataaaagacccaaaatagccaaatctctcctgagcaaaaagaagaaaactggaggaatcacaatacctaacatcaaattatactactgagctctagtaaccaaaacagcatggtactggcataaaaacagacacataggccagttgaacagaacaaagggtactctatttttggtttttwttgaggaacctccaaactgttctccatagtagttgtactaatttacattcccaacagtgtaccagggttcccttttctctacatcttcactggcgtttgttattgcctgtattttggatataagcaatttttaactggggtgagatgatatctcactgtagttttgatttgcatttctctgatgatcagtgatgttgagcaactctttatatttctatttactatttgtatgtcttcttttgagaaatgtctattcaaatattttgctcatttttaagttggattacattttttcctatagagttatttgaactctttatatattctgacaagggattaataaccacgaaatcagtatatcgaagagacatctacactctcatgtttgtaacagctctgttcacaatagccaagatttggaagcaacctaagtgtccatcagcagatgaatggataaaaaatgtggtacatatacacaatggagtgctattcagccataaaaaaagaatgagatcatgtcactggcaacaacacaggtggaactggagatcattatgttaagtgaaataagccaggcatggaaagacaaacattgcatgttctcacttatttgtgggatctaaaaatcaaaacaattgaattcatggagatagagaatagaaggatcattttccaaagctgggaagcatagtgggggacttcggggtggtccagatggttaagggatacaaaaaaactagaatgaaagaataagacctagtatttgatagcacaacagggtgaccatagtcaataataattgaagtatacatttttaaataaagagtataattggatcatttgtaacacaaaagataagtgcttgaggggatggatactccgttctccatgatgtgattgttatgcattgcatgcctgtaacaaaacatctcttgtactgcataaatacatacacctactgtgtacccacaaaacctaaaaataaaaaattatattaaaagacaaatatggcatgttctcactaatgtgtgggagctagaaaaagttgttctcatggaggttgagtgtctaatggtaattaccagaggctgggaaggggcggaagacagagataaacagaggtcggttagtggataaaaaatccattcagacagaataagtcctagtgttccatagtaggttttgatgagagctgttttaaactgacatattttaaattaaacctccctaatttccaaaaccaggcataactgccttccatgtttccctcacaccttycagaggctaatgagaatcacagtgctgcagggttctcctgggctctgggcagcagctggatggcgtgctccttcctggctgagaagataaatgtcacctccacatacatgggtttgccagctccatggggtccagccarctcctctgagaactcccagagttcacaatgggcacttggccttgggtaactgaagctgtctggtttgcttccctgcctgaagaatgggaataataatatttaacccctagacaaggagaggtagagaaggggggtcaggtaccatatacacagtgctgcctgctaggtgaagcagttccctccctgtaccatccccgctgcactccacttccctggcaggcccctcctctttcaaggagcccagtaggcagattctaaagatggagagcaggccagctctccagccttgctcctacacagctgtgtatgggaactgctgtgctgtctgctcagcggccccctcacacctgctctctctgggccaggatgaacctcagaacctcagcctcctggtcccactgcagaacctcagcacctaacagagcccaccctcttctgccatttgtatctgagaaagaactgactctggaaattctcatttatccaaggaaaaggacccccctttaaaccaaccagaccttcacctcacctcactgccttttcttttcttgtctccttttcttttctctatttctttcttttcagttctttttttccttcttctttcttattctccttgcctgcctcagtatagggaatagaaaaagcctggattggagttaggtggtccttactgagaattccaactccaacattaatcagcaataatgggaaagcgacttgaccttgctggggtttggtttctttatgtgtataatgtagacagtggttgctagtttgtatatttgttgtgaagactaaatgtgaaaatctgagtttttatttagccattaataagtaccatgtaattaattcattaatcagagtacccagggtgtgtgaaacactgttctacattttgagaatagagcaatgagtaaaagcaacatgagctttcatacttctctaatgggccattcaataagtattcattttcaatgtagttcctgctttgggggcattaccctgcttatcattgtccctgaaatatgggaaggaaagaaaaaaaaatcatttctcttcagccagtaaaacaactccagggaaaagagatgactatttagacaacagtcagctgggtgattgtagataaaaagtctacttcccatattatgtcactcagcattcatggttgcaagcaacagaaatcaactctggctgtcttatgcaaaatggagatttttctggaaggagattggtgggaaattagaagagcagacttggagcaagggaagtcaagcatcagagacaaccacatgctggtcaggaggctgtcagtgacactgatacgtcactgctaccatcactgctctaccactgctgggtcaagctgatgtctgccaagccaccatttgctatcacatactcargatgcaacatcctgcctccctgctgaaccaggaatattggaaggatctaagctccaagtttccagagtggaggacaggcattgagaattgctttcctgccaagatcatacacactggaggagagacagcatccctcttggtcaagggggttggacgctggacaatcagaaaatggacacacatctatcatacttttctttctgttttcctggctccatggagaatgaagagatgaaagaagcaagcttggccttttcttatcagaaagaaatgaaccaatgctggataccatctgccattgttaaaaggaagattctagtccagtgggccttcatttcattttgatggagaaaatgttttctccatgaagatccctagtatcaaacctgttctgcaaagagacctcactgatgagctggtttgtcatctgtgattacagcatccaggtgcttgtgtgatggatgggaagcctagattttcaggcagctgttataatgctgcttagcatataaacagataaaaatattttcatttttcccatatgacaaaagaktggtgattcccaaaggtgagaacaagttagtagtacattctttggagtattcagatgaccacggggcaaaagtcttttcaaattaagtctctgagtatttaataaatgtctgcttttccacattaggttgggtactgaaagaaataaaatattcagcaaacagtctgattggggaaagagactaatgtacatggaatgaattagaacatcggaagacagtgcacaaactcaggcttgagagtcagataagtcaaatcccagtcctgccacttactggctgttaagatttggagcaaatcttctgagccctgtttcctcatctacaaaataggaataataacaatacctatctcaatgttatctaatacctacctcattatataagacataaaatggtatacatatattgttaaggattatgcctagcacatagtaagaattcaaaaactgttacatgtcatgattgttctaacagcaaagtctatatggcatagggataaaggtgggacttaaaggggaaaagaaaagggaggtgtcacatgcagacagagaaacagatacaaagacatctttattagccattcattgagtcctattgtgtttctggttctgtagatgacaaatgaattggtccactttcaaggaactcaaagtccagtggaggaaatgaacaagtagattttcatcattattaatgcaagtgagttcagataataagaggccatttgatctagagcctccattgaagacttcccctctggactcatggccaaatagcatctcttttccttatttaacctgctggaaaaaacaaaacaccttgcttctagagcctatttccgaactcatgacaatcccacatctccatcttcaaatgcatcccaattatggagaaagtgccatgaatagcagccaacattttacaacactcagtaaatgtcaagaactgtgctggatttatctcagatattataataatatccacaacagtccttctcaggaattatttttattcccattttacagatgagaaaggtaaggctcagagatgataaatgacttgtccaagcatgtctttaccattggagtcccttcttgatctcgtccttactaagctgatcagattcatcttgtcacgccttccctcccagttcttcctccccaagctctatgctccaaccatcctgaactacttatgatagacacatatttagaagagagtgtcaacaaactgcagcccactggccaaatatggctctctgcctccttttgtaaatagttttattagcccactgccatgcccatttacttacatgttgtcatgctaccacaacagagttgaagccatatgaccacaaatcctaagatctttgcttccttgctcttcacggaaaatgtttgctgacacttgctttagaattcgaaacctccaggctcttgctcacactgttctttctgccaggtgtgccatttctttcaccaggacataataagatttgacttttgactcaataccctctgagaagacgtccctaatttttcgaggagttagtcactttctctcttgagttgccactgctccgtgtgtacttctactcttgcatttgtcatattttattgcagttgttcatttaggtgtccatgtgaccttgcatccttacccctcatcatgccactcaattccttgaatatattgggctctcacttaatatgtatggaaagaaaatgaagtccttgctgatttccctgcttcttagcatactgtggtcaaataatgaggggatctcagaaacagtgtggtggccagaaagaggcactgggagctggaagccaagactcggaraatgtgctgtctcatctttagttctctcatcttacctcccaagtagcactgagcaagtctctccaccttgatgagcctgcatgccttcctctgcaccatgaaaggattgaactagattatctcaaatgtccctccctgccctaaaaattctatgagactctgatgtctatgactgaagtttagcactctaaaatacagtcaggaagacatctaagtcacaaactctcttttgttgtcaaaggaggttttgctagaaagaagcccaagaatgttctagaagtccaggttgaatgtctatgattacactctagaatctatttaaagttttttttctgttaaaaagtattaattgccaaatcgtgatgttccttcctgttttatgtgtgttagatcagaacactactcactcagcatccacagggagagatatagcctctggatactacatatggcaaagccaagccagaaaggggtggctgatgtcgctgaggtgcccaccatcatccaaccgcaggcagcacttcccagccccaagtttccagccttctcctgaggcacattccctaacttgtctatgacaagaggcacatgaattactttccaaggtacagattttcaggttcctcacctaaatccatgaatttgaatcacctasattggggccaaggaagctgtgtgtttcacaaacagctgcagtggttcaacaggaaagcttgggaatcccgacatagaagtctgactccaaatgtgaagttccactggatcctaagccacagaggtttggggtcactgtttggttgaaatggcaagtccatttgtcacccaaacaaagggtaattccaggaaagcatttgctggaggggatgcatttttcaagacctgctgcagcaccttcagattaggctcatttkcacacctgcatattttcccccaattttccagcgtaaccctgtgtgaatcattgcagttttgctaattgaatctgagagcacctgtttyttaatcaatattaatgcatcacatggacrcagaatttgtaatgagtcattctagggggaagaatgatgaaattcaaaaaaagtattcactattcatctgcaacctgataacttgtggccagaattccatctgggaagatgtagggcagagcaggggtaacaaacagggagccccgagacaccaggcccctccacagggctctcgaggcacttacctttctcccatttttggaaagggaaaacagtgcctataacctgccaactcccaaacacctgttctgttgcaccctggaagtccccttctctggttctgagggcttcagtattattatagttttctgtttcttcgcagtccccaggctctgtacttcctgccacagactctctcttgatcttgctgtagataaaatggtgctaattcagctggctgatggmggtcagcaccttccaggaggtagaagcctgagttcctgggtccaactctgacccaagaacacgaggctccagtgtttctatttcctcagcagtttccgctaagcagtttatttctccaggaaacacccctctcctccctgagcagcctgagctagaggccccatttctgggatcccctgcatttgttgtaccttctagcatactctcctctgattgtttcggaaacagaaagtgccctgctcatctctgagtcccatgcctcgcacaaggcctgggaaaatgtaggcactttaccagtttgagttgaacaaatgattgacactgaattatttcctctgygtaaaggtgttagatgtgattttacagccatcaggactattaccatgtggtcaaggtgtgttttctgcaatcccatctaagttaatggaacaaaacctactagcaaagtgttaaatcctgtaagacctcatcatctggatcacctattcggtggccttatccttagaaagctatctgaagagtactcatatagcgatctatgcccctgagcaagcttacaggcaaggccagctgaccaagcttgacttccacagcatgctgggtctgaagggctgtgagctgtgcctctggtgcttctccagtccatcagttgagtctggggagagcttttcatgtgcccaatagcggctttgtcccatgaaacaggaccttcagagttgatgggtcccaaaaagactaacccaaggtaaacaaacacccagaagaagacagcataaatctgarggctgctattatttagaatgagagtgcactttctgaagactatgtcctttacccaagacagctctctttactatcatttgtcaacaaaaggtacttggactcggagagcaaaggggaacatacattcctgaaggatcttttctatctaaactgaggggagtgctgtgagccaatcctgcctcacaacagatgaggctccatcaataaccacattatttgtatctatatataatatttatggacagtgagagacagggtcttgctctgttgcccaggctagagtgcagtggcacaattatggctcactacagcctcaacctcccaggctcaagcaatccttccacctcagcctccagagtagcagggaccacaggtacataccaccacgcctggctaaatatttttgctttttgtaaagacaagatcttgccatgttgcccaagctggtcttgagctcttaggctcaagcagtccacccgaagtgctgggattacaggcgtgaacccctgcgcctggcctataaatattaatatctgcaatttggccattgtttcatcttgtgcccagcctgggagctatgctataatatttaagatgactatacacatatctgatcattccctttatagttgtccctcagtatacacaggggattggttccaggacttctaagtctatccaaatctgctcatactcaagtcctgtagtgggctcagcagaactcttgtacaaaaaaatcggccctccatatatgtgggttttatatccctcaaatactgtatttttgatctgcatttggttaaagaaaatctgtgtacaagtgaaatacgttgtttttattagtcaagctctaaactgtcctgaaatatttcttgatctctcagctggcccatctcaaagccaactcaatatcaccacttggatctttcacaggaactctaaactcaaatgtccagaatcaaaccaatggccttatttccaaaccaaggcctcctcccatccttcctatcgcagtaaatgctactactattcacacaattgtaagccagaaacctacaaatcatatttgatttctctctcttttttcctctcattttgttcagtctataaactgtttccaacatgaattctcttgcagtggattcatcccttccctattccctttgggttttattttcatcagggttctatggctacctaactaccaactgcctctggcttcctctggctgtgagagtctgctctgcccaatcgcaggcaggcctggagtgccaggaacggttcttggcccttggtgtctgaaaaacctgactcccacgccccgctacacagatgagattctccaggactgaattgtccaatacgtgtaggtactagctacatgtgactactgaggtcttgaaatggggctagtgcaaacaactgacattttaactttacttaatgtggactaatttaaattgaaaaacagatactcagttcagttactggaaagctttcaaatttgttagtatgacctaagtgtatgaatatttttttcaactacaagttttatgaaatttaaacacagatcaagtactaataagaaaatctggtactcaagttgagatgtgctggattttgsagactttgtattaaaaatgcatgtaaaatattaataatttttattttgactacctgttgaaatgatcatctttgggatagattgagctaaatggtctatattcttaaaactgattttacctgttttattcttttgttaatgtggctactataaaattttattttttatatttatttatcttttcttagagtctcacctcgttgctgaggctggggtgcagtggcgcattctcaacccactacaatctccatctcccaggttcaagcgattctcctgcctcagcctcccgagtagctggggctactcacaccaggtcaggctcatgcaccactatgcccagctaaatttttgtatttttagtagagacaggcttttgccacgttggtcaggctggyatcaaactcctgacctcaggtgatctgcctgcctcagctctaatccattctttacacaacagctagggtgacctttgtgaaagccaaatctcagtgtatctcactcttgctttaaggctttcaatggcttctcatttctaagatcttctctagaccttagaaaacacctagggtattctcaatctgacccacaagatcctgcacaattggcctaccttaccagctgcatcttgccatatgtcccattccccttctgtttctctgtttcagccacacctgcctcccttcaggttcccaagtaccacgtgaagagatcatccctcattcttccccacatacatactctgcttggcctcttcctgctaatccctgagtcctgtttaaatattacttgctcagagaaaacaaccttcaacttccagacaagactatgtcgtgctccctgttagacattctcccagcatcccacgcttctttgctttgtccttattgccatgtarttgtgcatttcattgttaaatgcctttctccaccactaaaatacatacttgatgaggactcttatttaaaacctgggccctgacacatagtagatacacaataaatatgtgtggaataaataaaagaacagctttgctatttacaatagattcttacttgtgttggagatggctatagtaaataacattccctacccaccccccttgtaccctgcatggcttaaattaagagaaagacccaggagtcaggtgaaagccaaaacgttagctttatggatgatgaaaactgtgtaggggatccagctaacatatgctgcaaagtgaatttgagagcattgtccacaccatcaccccaaattaaacttaccctaaaccatcaggctgacctcagtgaggacaggtctttaccactgaagtcccagcacagccaagagagtaaaccagactgtgccctctctgtgagcaggcctttcagagcagatagcatggcactgagcttcacaggcccagtcctttcactcaagtcaccagtctcagaagtatgcccctccccctttagaggagtgagaatggggcagagagtccagaagtgtttctctgggaacagtcccttgtcatgagtcaggaggtatggggaacaatggtctcccaaggcctgggaacctgcttacccatctgtaagaggaggggaataaatggcactgttgggagggtcaggtgaattggggtacttataagtgcttggagaaatggtgcgtaactataggatgtatgtattaaaaacctctgcatgtatcttggctggctggctggcatcctgctttctttcctcaactatcttttaataaaaataaaaattacttgaaaaaactggtttctggcccatggccttgaagcctagaagatgaccttgagtgggctgggcacagtagctcacgcctgtaatcccagtacttcaggaggccaaggcaggtggattccctgatctcaggagttcgagaccagcctaggcaacacggtgaaaccccgtctctactaaaaatacaaaaaaaaattagccggatgtggtggtgtgcgcctgtagtcccagctactagggaggctgaggcaggagaattgcttgaacctgggaagtggaggttgcagtgagctgagatcgcaccgctgcactccaccttgggcaacagagcragactccacctcaaaaaaaaaaaagaccttaaatgaagcaaggtttccactcacccctcccaccaatctagcattatattgctaccccactcacagaatataatagccaaacagattgttttgcaggcttgcgggcagggggagaagctaattaaaaatgtgctaaagtcctttgaaaattcataagtaagtgctaaggttctagtttggtgcttacattctgacagcctgacagcttcatgggttgaactcttttgaaaaagtaactttaaaacttgcataaattgcaccttttgtattttaagtcacacaggcatgacaacgtgattattcatgactttggagaatgttcttgacaacaagaggacattaatatccccagccctataccaaattaataagaagccctgagaatcaaagagaacaaagaagcagaggcccttctccttagaaggagagaagagtctgtgctttgaaatgtgctgggacctggggtgccacttataataatacaggtgtgtgtttctggctagtagctgataaatatgctcaggcagaaaccaccgaagagacaggtctgtctaccagcaaccgagccaacttgatttgctttgtgttgcaagtagcaattggacttctgagagttctgaaagcaggaaggaaaaagtatacaagatgcctgaaacattcagatggaaagcacaaaagaatcaaatggaggcccaacattaaaatgatagctacagttcatcgaagttgtattatgcatccagcactgtgctgaagcacatgacatggcaccctgaggaaggtattctcatctttatttcacagaggggtaaactgaggcatgggctggttaaacagttttcccgtggtcacactgattataaggagcagaaccaagatttagacctgagcaatctggcttcaaaggcccagtgagatcctttccatgatgataatcctgcagaaatctagcaacttctccaccaggctctgagggtgtcttcctactgaatgtctacttcatccttctctctgcttctcagacaggagatgactagcccacaaagcctcagtttacatcccctgtctctaagagactaccccagatgtaatctccctagtcctagtcccaaataagaaagacaattatctgagcagctcagctgcagtaaaggatccatacttgagtcagtcctctataaccagggttgggaatgtatcactccaacctggcttccagaatgttctacacactgagcaacctttgattatgaaagcttttgcattctcctcagtcttttatatcatagaatctctcttctctactaggttactcaacagatacttaccatgtacaagtcaatatgttagtcaggtaggaaatagaaaagcaactaagatgctgactctgtcttgaaggagcttatggcctggtggtagggatcacttgctggtgtgcacataaagcaatgcatgctgtgtgtgagtgttgtgtgcatgaattacagagatgctaagtgctctaagagcccagagaagggagacatcaaaaggctgtctcccgaggtgctccccagaagcttctgttggtggtagagaggtagagaaagcatgggttttagagtaaaagtctgttaaaattccatttcattttgtgacttcaacaaggtacttgaacttgagtctcaatttccacatttgtaaaatgaggctaataccatgtatctcacatgacagttatgacaattaagttacataactgtgttagctggcctagttcaaaaaaaaaaaaatgcttctctcttttccctctccttgtcttctctgttcccatggcaattgtaggccttccctcattttaacctggtggctgtggtggctggcctgtctctgtgtctgtctttccatcattcccatttggaaattcctccaggatttagtcaatattttagttctcttcatggccttaattactgaaacatgaaatgttagggatatatatatatcaaaaacagccaagtttaggaaatcttattttatatcacttttttttgcttcgtatcattcagcactttcattgtaaaataataagcaagtgcatatactcatttgcatttatttgcatatatctttataattgttacttgtgtgtgcatcatagtatcagcagtaatggtaatactagtaattgttaatagtaactatgagtacctaatgtttgttaagtaattattatgtgttatgtactctttcaactatctttacatgtattaccttatttaatcttcacaacaaaacagtagccactattgttctccccatatacagatgaggaaagtgaggcacagagaggttcagctatgtatgagaatgaaatagaggaaagtaagtaggaggagacataggattccagcagcaatgcagagcactccacgaggcatcacagggatggtaattgaaccctgattctgcagagcacgtggcsacagatgaggcacatacactctgtgagaggctttgtcctcacctgtgagatgggatgcctgctcctacttcagagattcctgtgtgggaaccataggagaatgagtgtgtgaacactctctgtaaaayggtaaagagccatattgatgttagccagcttggtattggtcaagcctcgcctcactggtctcctcccctcctgccccattctgccactcagaacctaggaaaccattgttccaagtacaagttcaatcagtgcttgctaagtcawcaggaaagagtcagggctggctaacattcactttctcagatttaggaagaagtggcaaggctgagacatagtgggacagccacccatgccaaaagggggaaaggcagaacttgagatttccaagtgtatgactactgagtttcatggaaaatcggagtctccagacccaacatagccattacagagagtaggcaatgctgggtgtggcatgggaaaactccattgtcttaattctgggaggtgatataatagggagaagtcttagcactgggcaagcctggcttggtgacctrattttatcaccatcttgctctgtgattttggacaggtcaatcatcctccattataaggagcaccttttcacatctataaaacaagtgtaacattagtgatatagtttggatatttgtcccagtccaaatctcacgttgaaatataatctccagtattggagatggagcctagtgggaggtgtttggatcataggggtggatccctcatgaatggcttggtgaagagtgagctctcactctgggttcacaggagatctggtcttttttttttttttttttttttttttgagacggagtcttactctgtcgccagactggagagcagtggtacgatctcagctcactgcaacctccgcttcctgggttcaagcgattctcctgcctcagcctcctgagtagctgggactacagacatgcaccaccacgccaggctaatttttgtatttttagtagagatggggtttcaccatgttggccaggatggtctcgatctcttgacctcgtgatctgcctgcctcagcctcccaaagtgctgtgaatacaggcgtgagccactgcgcccggctgagatctggtctttktaaaagtgtgtggcacctcccccaccactatctctctcttgctcccacttggccatgtgagatgcctgctccctctttgccctccaccatgaataaaggccccctgaggcctccccagaatccaagctgatgacagtgctacacttcctctgcaagctgcagaaccatgagccaactaaacctcttttctttataaattacccagcctcaggtatttgtgtatagcaatgcaagaacagcctaatacaatcagtaccagctcacaggattactgtgatgactcagtgagatactgtgctcagcacagggtcttgcacataggaaacagaggaaacagttgagcaaatttgcacaatacagtttagcaaatattagtattaatggtggtattatttcgtgcccctccaagcctagggtctcgggggagggtttgtgtctccttagttttcattgtttaggggttctttgtttctccatagcatatggagaaaacataggatattatagccatatttggtaacttgctggtcaccacagataactatgatttagagaataacgtagaagtcatgcctggaaagctttttatttctgggcggggcggggagggtgtcaggaatgcattttacaatgtgcagctactgtgcattcttatgaattaaaaacagacaggcacacccaaatagctctagggaaaaaaaaaaaactacagaggctatttttaaaaggtttaacctcagtcctataaaagagcaacagagatatagaatcttagatttgggaggaagcctcctagatctccttcctgtctagcctttctacaccagatcctccagcaactggcctaaaaaagactcagagtagcaactttatggcctcagagtaacagaggatgcacccatttcttgagcataaatggacccccatatttacacactgccccacattgctatttgatcattgcctgtggctgaattgcggctgccctcccatcatcaaccacgttggcttctcttatatcccctctttacctggtctggggctgaacaatcaattcatgttgatcaaccgttttaggatgcactggtgagtgcccaggaagtagtgtttaactcactagctatattgaayacactttttctctggtctagttcaaacagaaggatgactggaaatatatctttgatgcactgtgctggtctcataggatttatgtgagcctgaatccacccccttttacatatagctgatgtctaccaattctgctagactgatgtcagggttttatttccttcccagaaatgtttctgagtaccctttaacccactccccatcacccccaaatacacacacacggtgtgagtcattaacttcctctacatatttcactacgtccctttgcaaacctctgtcttagcacttaccattttgtacagaattgtgtatttactcctcagtccccacaagagagatgastctctcttttatctttgtattatatttctagttctagcacactgcctggcaccttgtgattgcttaagaaatgctgggtgagtgacccagtgtgcccagtagtggcaaaaactccaccttcagctctcccaccccaccagcttgccatggatcctggggtgtaatctcaagggaatctgtccatccattttaaaaactatgagcaggctaaatattagtcatccgaatgctgttttctcattgagttgccttaacaaatggcaagaacagatggcattcaagacatgttgtcattataaaagtataaaaatgttatttgtttttaaaattaaaaaaaatacatgcacatcattgcagacaatttcaagagcagccctggaaaaaccgtgtggagaagaaatactgtgtttttttcttctcagtcttgccatgtcatcagttttcatcatyggccctttcctttctgaaaacgagatgaactctcaaaattgagttttgagacaagtttgattttcctttgtcctagctggaaagagagctttaacagagatcacatacccactatgtgccaagtactagcttacatgacttgcagtgtagcctcacagggtttgtgccacattgtttaataagcataagcaaagttttctataaagttaaagcagcagcaatggagagaagktaactgtcatcactgtggacttgatatagtgccaggaactgaaatttaaagtcaggaaccctggcctcataaatgtctctccccatgtaagcagatgacatcctcattgcagaaaaagtaccagccagcaactcttgctggcttgccttattgaaagttgagcactaagatcaatagagcaatattttatgaaattcaatttatcagaagatttgatgtcttaaagatgatggaatgtcttatttattggcaatcgtagaaacttcaggaatgtttggcacactgaatggtaaagcccaaagttgatttgaaatttcctgtccttgaaagaagacagtgatggagagtcgcttttgaaagctgaatctcaatcccaaacctttgcagctattgtacaagcaggccaagatcccaggccaaaatgaaagtgtcgtgtgccatgagttttaagaactgctgctaccagaagcaaaataaaagataaacaagaaaaaaaaaaaaaaagcacatctttatgtggatccaggctacaaaaaatgttagcctttatccctaccccgaacttttcccgaaggaaattgtggcaaataatcaggttaaaactgagagtcactaaatgcaatgtagtatcccggcttggattctggaatagaaaccagacataagtgaaaaaactggtaagatccaaataaagtctgtagtttagttcagcgctccccaacccccaggccatggaccactccccaatgctcacattactgcctgagctctacctcctgtcagatcagtggcagcattagattctcttaagagcatgaaccctattattaactaagcatgtgagagatttgagttgtgtccaccttatgagaatctaatgactgatgatctgtcactgtctcccatcacccccagatgggaccatctagttgcaaaaaaaaaaagctcggggctcccactgcttttacattatgatgagttgtgtaattgtttcattatatgttacaatgtaataataatagaaataaagtgcacaataaatgtaatgtgcttcgatcatcccaaagctgtccccccacccctagatccctagaaaaatagtcttccacaaaaccagtccctgatgccaaaaaggtgggggatcactggtttagttgatagtggtgaaacaatattaccttattagttgtaacaaatgtacaatgattacataagatgtcaacattaggggaagctgggtgagggatatatggaaatctgtgtactatctttgcaacttttctgcagacctactgaaattattccaaaatatcaagtttgttttacaaatttaagaggctcaaagccagaggtcactgaggatgaagtactaaaaakaatgtgagatatgraatycacctaakgatgaatgaagtatgagtgtgaaactcccctcttcttctattagtagctaaccatgtgattaagctaaactccctgagcctcagttttctcatctctaaatacaggcataattaaaycctcctcatgcaattattataaagatcaaatgagagaacatttaaaatgaacttgcagttagtaaacactcagtgcacaatagttggatttagtcaatggccaagacaaggtaaaagtcaacagttagagattttttaaatagcaactgatctctaccaaggcacctcccaagacttctggacaatgagttttattgcaaggatggagcaagctaacgggcattgccagtcattgcctatcgaggacctctggcaggatgttgaacttagcacaatccacttctcaccttaagtaaacacttcctaattaacatattataattttgagctctctgattcatggaaaatttttcttttcacaattattttcccaagttacttgagttaacagcaaccttactttcctgactaaagtccattttagataagaattgcttcaagggaaagaatcctgattctgtttataacttattttttcttatctttggtgttggagaaataaaaataagcaaaaayaagcaaactgacatattcatttatctccccacttccctgcaaatagatagattgcccagcaaattaaatgtcagctaaggaaaccacagctcagagaagttaagcaacctgcccaacaccatgaagctaagagcaaaggagccagaacttgaacctgaccccaggagctgtcctttctcctactatgttgcctgtccactccactggaatcaagttgaaaaatgctagtgaaaccagtatttcccacctggttctccctgccagatcagagccttccagcatggttagatagcatgctggagcttcatcagctctcacatggagacttgtggaattcattttcatccacttctaactttaaaaccaaataagtaccttattttggggtgcagattatagaatcaagcaattccagcaagcctgaacatggagtccttgctcttagagggtctaccttgagctggagccttttaaagagatatcattggctagggctgcctttggctccaccaccaagtgcctggttttttctcatacctcgtaggcaaccctgaattaggatgagtttacagcaccattgcttacttccgagcattcctgaacccttttgctgcccggcattcctgtttttgaattgcatctgtttgtttcaccttcaggaccacctgctttctcaggctggatttcacacttggcactgcttacctcgtagtgatctcagcttctctcttcagctgtaatttactcttggctctcagactacttacccctgactcttccagatatccatctgtctgtctggtcagagccatctcagccctccagactctccctggtaccttctagttcttgacatttctgctggattgtctatacccaaccccccctaaacacatgcatgcacacacacayacacacacacacacacacacacacacacacacacagggagctgcctgccttgcaagctctcattagcattaaatgccaagtttcaggaataaccagccttcttggttacaactaaaatggagatcgctgcattaatgcagtaatggaaatataatgaaggaatttattgtccctgaaagacaatatctgccacacaaaccccatgggatatctccagacagtaagtacagctccacgcctctaattctctggcccataattatcttgggaagacggtgaccctgcagttctctctattaagagtatatttccttacaaaatgaactgtgctgtattgaattgcatcattttgatcactagaaattgacatattgggctcattagccaggaagttggatagttaatttatgaggtttctcggagcctgtcccagaccactcattgagggagctaaacagcccacgatgagatagaagaaagttactccagcagagtggctttatttttctctcattacagagataatgaacagaaaacttctctgrtacagatattgcttcccaccccttctccccccaaccccaaaatgattttgctttattgcaaccagataccatttgatgggtgaacagtcttattctgctcattagcaccatttttcatttaaaatcttcaactgctgagataaaaagatgatctaagtctttgcctttatctttaatatttaaaactgttcacacaaccttttaaaaatcaaatattgatgctgctacctgttgttcttcaaagtggagcagttatattgcaggcccttcacagtaagcctgcctttattagaaatgagaatggggatgttaaggagacgtttatttccctctctgtggcctctgcccccatccctataggtggagagctaggaagagcatttggttcttaatcaagaaatgtgctgaggcagccacttgaaagcacctagtgggcaggctggcaagaaatacggagatgctaggagcatcctcagggtcgattctgcagaatggtactgggcccttggagtcatgtagcctcctaggctctcagccataggccagcttcctacaacctctgcaacctagattcttggggaaccgcagttgtgggcaatgggatggttccacactgccctctagtgactaggttcagaagctacatgtatcacacagtccattgcattcagcaattcaaggaggacctgccctgtcctgtgtcagggactggggatatggaggtgaaggagacacatagccttttctccaaggatttctcatagtgggacatgggggcagataattacaaagctatgtttatgtgttattacgcttaagttaaggaagtcataggaactcagggaagcatcatcaccaagcctgtggggtttcaaaggactttgaggaggtggtcttgacaaatgagaaggggctttgcaagcctaggaaaaggagatgcagctcagagcctgattgtgaagggcctgttgtgccactacaagattgttggcatgagcagtcaggagacaatgataagagtttcatagagatactgtgtatcatccatttaagatgcacatttttttcatgtttcaacatctctttaggaggcctcctacaaacaatggcatattttattttattttattttatttgtagagtttttttttttttactttcatggtggttcataaaatcaggatatatttcacaacctatggcatatttcaggaaatatggtaaaataagggcttaagttgggccatgtctgggggacagagaggaggggtcagaataagatgagggatagaataagatacattagcagagacagagagaatgggcagattacagagggtttttaggaggtggaatttctttaaattgttgaatgagtgtatgtcagaggtgaagaaggagaagaaggaaaggttactctgctaagtgtgtgtgtgtatataagcaactgaaaggaactcatgaaaataagttttgctgtgagcatttaagttcattgacagtaaaagaggtagggggattgcatagcagaaatgcaccatgaaatcacctcatcgagtggaaatctgagaggcttttcagtggactagaatggtgaatgtgggacggaaagggtgttaaaatgggtcagatgatttcatttggaccctctgggtttatgattgtcttctgtgtatagaaaacaggagcacagaattgcatttaaytgtctctaattcatctggtgaacatgctttcctgatattagctggatcaattgtacaaataacttcagaaccactcaatacttttgtcatggatgagatggaaggttccatttgctttcccgtgctggataaccagagagctgattttagggtcattagatggcaataaagactccccacccccacagcacatgctccaccgacttccctcagtaggcatttcactatattaaagacgcaaactggctgatgtaaccattgctttgaagccatgaaatggaatgtcagttgcakaaagtgagccacatatttctgagatattgattattgcaatataaatcttctcacccctaaggtaaaatcctagctggtgctgtgagctacttgataatcatgacattgggcttttcttgggttttgatttttatgttttattcctattaggcaaagaccaggcaagagggagaagaccattgaaagaggtgcggtgggagtggaggtggggrtgcacatcacagaggaggcaccaagagtgggggcttgcctcgatatagaaatgtagcaactctggagaattggtgtcacagggcagagcataaaagcaggacattatttcctcggaaaagtgtctttttaaaacatgatttgtttcattttgcagtggaaagggttggacagatgtgcattcaaattctccctccttttcttgctagtgtatgacctgagcaagttatttaacccctcagagtctggtgttccttatttgtgactcagagatagtaatacttcctaccatacagattttggtggaaagtaaataatagaactaygtgaagccctagcaaagaatctgtcacacagtgggtgtttggcacctactgtcaccgatcttctgtgcaaacccctccccgcagctgctcctgttccaatcactctgggaacrctggactcatgacaattgccactccctttgtgtgccttatatttgcccattcccaagtcttcactgattttattccctattctaggcatctcyagatgcctacatcctacccgtgctcaaagacacatttcaaatgcccactcctctgggaaatgcctgttgtacccctggacacaaatcatctctcctccttagagccaataacccatgctccaacacccatttcaaatgcctactcctccaggaaatgccccagtacccatggacaaaaatcatctctcctccttacagccaatacagcagctcaccaggcatgggctctttcacatgtattatctattacacttacagatctgtggcctatttaccctcactgagcctcagtttcttcatcaaatggtgataataaaaatatccacttcatgaggtagtggcaaggatcaagttgctaatgcatgcatagttgcagccatatagagctctgtagatggtagtgataytgatggattattattattagtatatctagatatgatctctagttagaaaatgcagtctccttggttgcttgcttctagaaaggwtgcatgcagtttctagaaactggtgtctttttctatggtcacacctcacttgttaagggcttcagttgtaaatagcatcagtggtaaatccaataataagtgcctgaagggtagagacctgtttggattttggttgtggatgatgtctatatatcagtttaggaccctacgccttgcttccacggcacagcaaatgttcattacacttgcagagccactgagaaatgcaaatacttgaaaactggacagcaatgtgaaataccaaatgcatagtcattaactgacaaaactaggagctttgatgaatagaataaatgattgaccttcaagatgggagcaaggattaggtaatcttgggaggaggaagaagcagtgaaatgaaagcccctgggaattcttccatcatctcccaacaaatatacctgtgaacaaaaggtttcccacttttatgtcatttatcttttcagtttttttaaatgattttcagattcaaccaaattcttaggagagatattaagaggtttataatttagataatgggacacattatgtattcctagtaaatagcactaagctatgcactactgagtttcaacatcaatagattctaactgccaacccaggcaactgtcacttggctgctcccagggtggttggcccataaaacttgcaatatgaatcacacactcaaaaagaaaaaaacctcaacagatagagggctatctgtctgttttgggggtaggaaacaaatataagttactggcattagatgcctaatttattcatggagtgtttaagcctcctcagagcctggtatcctcagcagctgcccagccggccactccttaatatagctgtgttcgcataagggagggcagcttgggaaggaagactgacccgaccaggctgcacttccagtatggcagccactagccacatgccgcgattgaaatgtggtgagttcgaattgtaatgtgttttgagtataaaatacatattaaatttccaagatttatgaaaaatgaatataaaacacctcattcataattattatatcgattacatgttgaaataatattttggatatattgggttacatgaaataaactcctaatgttaatctcactgttttgtttcattaatgtggctactagaaaatttaaaaattacagatgtagcttgccttctgtttcttttggatagctgctgtattggacaggactcttgtagcacacatcccaggttataccatcagatgtgattgtctacagagtctttcatttcattttaaaaatsattctgtttatttttaaaattcaaacaatatgaaagagcacaaaatgaaaagtaagtctcgcatcccatcccctccttttcctgcatttctctctgttcctcctccagaggccatctcccagtgtcctgaatactgccccaaagacatccaagagatgagagatgatgctcctccataccgccaccatctccaccgctccctgctgtcacacacctggcctgtctcactgatttaccctgtctgctgaccactgtggctgtcttcagtgtgtcctagagcacagcagtcatagtgagagagagcctataggggcaaggacaccatgggaaataaatgttacatacttaacttgcatacaatgaaatgacgaatgagcaaagacttactatctaattatcccccaaacatttgctatttctactttgaaaaactggcatcaaggattctgacatctgaccagtgatgaccacacggggaatgttaagaaggatctatggaccctgccagtgtcctgtgtgccactgtgttccacaggcaccccttaaaaggcattttcctctttggagataaaataactggagatcgggagttatttgcctgaagccctgtgaatcagggattgaattaaatgacattaaactagaaataagctttctaaggcaagttttagtatgttaattaaagcagcctaaccttgaattttcgtagtttagggaaaaacagtggcctgaagatgaatcaatgtataacccactacatatatttagaaagagctttagtgctatatctttataattatcaaagcaattccttaaggcacgaagggaggatggagaaaggataaaaaaaaagtcactctatattactgtaccccttccccactgcactgaagaactgtcagactcagctcaaatgaacatcaaaggaagctcagragaggaagacatcagattcctgagtcccacctcagacctactgaggcagaatgggggktggagcttggaccaggtacccagatgatgctcaaagcaaaaccttatccattttcatccaacaaatggaaaccaaacattgttcaggtgctgagatatggcaggaatcaagrctggtaaatakacatccaatcatgcctatattatccttaccaaaaaaaatatattaaatatagattattatatataataaaatattaaatattttatatattacatatttacatatattaaatatatttgatatattaaaatatattttaagcacacacacacacacacacacacacacacagagcaaagaagtgtactcaacccaatcttgatttcggctggcatagatagccaaggtgagcccccaactcatgaaaggagcagcagcacaggcaattccattgggggcatactgctaatcaatcagctggtaccatcttggttccaataactttatccagttggcataagactccagccactcactaagaagtaagaaaaaaaaattgatccagacaaccaacaatgaggggcttgacaagaactctccaggctctccacatgctagtgggctaaggtttaaagccgaattttaacccaggtaaaggaattggagaactaaaccagaaacccacactgaactggggtcatacggattaggcctgcttgttgacacttaagagaagcacagtgaagcataaggagattgactttgaaatcggacagtcttgcattcacagtctggctcttgaacccactggccatatgagctgagcatgtggcaccaccctcttactggaaaatgggaagctcatgctgacctcgaaggttttgtgtcaggatttttaatgttcataaggcagctaagcagacacagaagacaaattaacaaatttaaattttgtttataatactaaattattaaaataacaatattaaactaataaaaccattggttggcagtggtggttcagtaggaaagaaatacatgggactcaccccccggaaacctacataccaggattgtgagggaaaaactcattccagataccactctctgaagtgtgccttcctggtcagaggctgggcagcctgaaataggtgaagggcttcagcgccaatgactacgtgtggcaagaacatgttcagcctaatgccagccatgagcccatggtatccttgggttggatggaggaaagggagcattctcttgatttagcccacgccttagtgaaccaagcaatatctttcacacctgttctctgtgtcttttgtcattaccaagatcaatcaagttgaagagatgcttcactgcaatggtgctacctagcatccctgcagagtgtgcaaataaatcatgtattatttgaagagtcaatattatcaaaaacagattcaatgcttttaataataatatgatttaatataataagcagtgcatgtgatcatttcatctagtttttcagtgtagatgccaaaatcctatcctttttacagaggaaacacaggctgactcagatggataggtaagagaaagatcagcgtaaacttagcattactaagggaaaaaaacccactattttccctgcagggttaagagtagtgggtgagatctcagaagtacatcaactctcctacccaatcccaccaatggtaactcgaagcagatcgctccagtctggttccattttcttatttacctacatctaagccactcttttcctaacagccccagcctacgagctccaaatatttcccttctgctttctttcaaagatgcattgcaaaagaaaaaaaaaaggcctactcctaaagctccacaccctctgccaccatgctcttatctagcctctaatcttttccatttctaatcaatactatgaaagctacatagcataaaacatctggacaaacagtgagaagagcccagtatctagatacatgtcatgtaaatggcaggtccagatgtcaacttgaattgtttctgtttttctataggctatggtagttgtgtatacacacacttattatagtactctagcatttctaactttgagtcagtattcttaggtaccctcagcataagataatttaaaggaaaagcaagagaataagaggagggggaagagtgctacataaagcaagaaacactcagtgggttgatttctaatcttgggtttgctacttgtttgcataatcctggacractcactcaaccactctgtgtctcagtttcctggtttattgaataagagcttgatgatctctgaagtcctttagctttagaatccatacgcccctaagtttgctaatctgtgtgtctgctatgctgcacygaagccaatgatttgactccagtttttggtactaatttttttttcttgcgtcgatgcttccagagtgcccatgtgagcaggcagcacactggctttttgtattcactctttacaaatcagccctttgatctcttgagctactttgcagaaaactagactaagtggtgttcttaaatctcagactcactaattacattgcaaagaaagcctattacacacctcagcagagtggccagagacatataacaggaaacttcggttgcaaagaaaggtcacctaattcatgacacggccgttgaatcttcttcactgagtggcctcccaacattttgggctcagccacccagttgctcagccaacactaggagaggcaggtatgacccatctctcaactcccagcaagcggggactggaactgccctgccaccctgggtctagaccaggtctggatacattaaacccaacctggcatatccatgcagacatcatattttaattaagaattgatccctaaccccagaagctttttaaaaactacctcatctcatggctgggcacagtggctcacacctgtaatcccaacactttgggaggccaagacgggcggatcatgaggtcaggaaatcaagaccatcctggctaacacggtgaaaccccgtctctactaaaaaatacaaaaaaaaaaagttagccaggcatggtggcgggcgcctgtagtcccagctactccggaggctgaagcaggagaatggcgtgaacccgggaggcggagcttgcagcagtgagccgagatggcgccactgcactccatcctgggcgacagagcaaagactcaaaaaaaaaaaaaaaaaacaactacctcatttccccagcactcagcactcttcctaccaacttctgacttcttctcttttaaagagctatagaatgtgcagtcaaataggcctgggctmgaattctgggactgccaatttctaactgtggtgctttaagtaaaaatcctttaacccctttgagcttctgtctcctcatatgcagaatatggataatgccttcctcacctgggcagcataagggtgaaatgagatgatgatggaaagggactgagtacacagcccagagtacaccacagtcaagccgctgttgtggatgttgtggtctatcagctcccagcgtgtttatagttatgtatttttatagttatagtaaaagaaaatctgttgattcaagctcattcttgttggttaaaaaaaaaaaaaatctgctgaagaagactgtatcccaaatctcaaaggcaagaatgccggctcttctatgttaccagtgaacagggcccaggtgccaattccatatagaatagtaaataaataaaaaggacattatgaaatttctgaaatgtacatggtcactgagaaatgggagtgcaccctctctacagtgactttgaagctactccttgagaccctgggaagagcatgagcttgggtcatgaagacttgaattctagtcccctcacttattccttttgtatctttgagtagaattcttagccgacctgtacctggttttctaatctaaaaagtggtacaacatctgacacatagtaaatcctccaattagtaggtgtcctccacccttcctttcctaactaactgggttaagaatgcaagtagctcctgtacacgtcagataggccatctcttccttctgcatgactgaaattctatttcctctcagctactccatttttagtgttatatttccatttaagctgtagagaattattttttactatattagaggagatctgagtcagactgccttgagagagaacatatcggaaacctcacataatctttgtgtcacatcaagcaagtagctacttattgaatcttttggaatttctgaaggtaagatttcctctagcttagctttmtgcagtaaacatccaccctacaagcgctatctccattaaaccaaaagacctttgacatgtgtattttgtgaattggtctttataaaaagatatacctcttcctctttgttatctcaaaatatgagtttatacaacatctaagacccaaaacaataggggatttacatcaaaataatctccatggtcccatctatactcaaggataaacctgccttgttctttaacaagaaaagttaaattatttctttataattgttctatcattcagatgtacatcttttcaaactggttctccttctatgtgactgacatttggaaaacagtctttgtgtagctgacttytaaaattatgtgatgtaggaaatatatagataaaatgcatatgtgtttgtatcatatataatatacatatgtgtatatataatatatacagatatagataatgtagctatataatatatgcatgtatatatacacacacgcatatttgtattatatatataaccctttatgtgtggtatcagaacaactatttggttaagagctatttgaactgatgtaataaagaaggcaaatagaatttgaaaataagtgtagtggttaattgatgtgttaacttggctgggccatggcactcaaatatttggtcaaacattaattgggatatttctgtgagaatgtctatggatgagataaacatttaaatcagtggaatttgagtaaagcagattgccctgcataaggttgatgggcctcatccaatcagtggaaggcctcaagagatcaaaaagactgacctccctgaatgaaaaggaattctgcagggtaccttcagaggtaaactacagcatcagctcttgcctccagcctgcaggcttttggacttgccaatgtccataattagatgagacaatttcttaaaatctctttattttacgtgatatatatatatatatatatatatatatatatatatatatatatatatcacacacacacagtagtatgtatgtgtgtgtgcgcatgtgttgtctctttattttacccgtctttatacatatatatgtacacacacacacacacacacacacacacacacacactattctgtttctctagagaaccctgagtaaacagtaagtaatcctaaacatcctgagctccaaactactgtgaggctcctacactctcaacccacctcttgaagaaaatnctgtaatattacattgttaaataaccagctgtggctgggagtggtgactcatgcctgtaatcccagcactttgggaggccgaggcaggtggatcacctgaggtcaggagttcgagaccagcctggccaacatggtgaaaccccgtctctactaaaaatataaaaattagctgggcgtgatggcaggtacctgtaatcccagctacttgggaggctgtggagggagaatcacttgaacccgggaggtggaggttgcagtgagccaagatcacgccactgcactccagcctgggcgacagagtgagactccgtatcaaaaaacagaaacaaaaactgcacaacctaataatttccagtggttaaaagcacaggctttagagccaaagatagctgaggtcaagttctggcccccgactgatggcagtttgcttctatggaaagtgccatagaaaccaggtaagacaggtatgccctgtgggaggccttccctccacatatgggtttagcctaatatcttcccactgagaataagcaaatggtgctgggtttggtgagggagaaattgtratgattaacagagaaaattcaggttcagaatttaccgccaccccctgtggcacccagtaaagttctaaccaagatgccatctttatgaacaggattgtggctgaatttcaaagaatgaaaatttttcctaccttaaaaatrcattgaccaaatttatttccctctaaacatgatagtgtcaccagaatgaaaaaagatgaccmcatttattagaggccccaaatcactgactgctgcaaagcactgtgtttgctatgcaaagacatctaattttgcaaaataaatacaccaggcatacaatttttgctttgcaaaagaacatagtgcttctagatggtctcaagttatcaagataatattgattgacatacaacctggacaggcacatctgtggagcacctattacctgcttccctcaatatacgtagctccaaccagtctcaaaccagtatgaattccgcaggtgaggaaattgagggacttccttgaccttcaggtttctcgaagcctcctcctgggatgaacttcagcaggctagcatccaattatagtcctctcttttcctgaaaaagatcccactttttctggaactgcctaagatctgcaaatagagactggagaagaaatgaaaatccccaacatattttttatttacttgttttttattttatttatttatttatttatttttgagatgcagtctcactctgtcacccaggctgcagtgcagtggcgcgatctcagccactgcaacctctgcctcctgggttcaagtgattctcctgcctcagccttccgagtagctgcaggtgcctgctaccacaccccgctaattgtatttttagtagagacggggtttcgccatgttggccaggctggtctcaagcccctgacctcaggtgatccgcctgcctcgacctcccaaaatgttaggattacaggcatgagccaaagtacctggccccccaaagtatttttttttaatctgaaatgagcaaggacacttgcatttgcttacatcgagatcattagtcttggaatcagaagacctgggtttgccacctgccactgtgtgattctggataagttactgaaccttcaccagcccccgcttacttcctttgctggtaaaatggacatcacacccatctcacaccttattttgcagtgaattaagrtaaaacaaaaagaactgtgaggcagccagaggcaacctggatatcccctgcagcttcaacttctccattctgttttgtttcctggtctgtataatataactttttccaacatgctgcgcacccaaatagttcattgaaaacacagtaattagcattcgagataaaatggcactgctgcaatgttaattactgcggtgcagatgtaccctcagatatcatacataacgttgtcaagcctttatttttaaattaaagtgcaacaaaccatgccctggctacacagctttttttgattaatacaaattaatgttatttcggtatctatgggaagagtggggaaaagggggtgttgcatctcgttgtaagaacacataggaaaatgatagcagttatggattgcccataactttgtgcccccattcaggtctctccataatggagtgtgagctccatgatggcagggagagggactggctttgttcaaagtcatactgtccccagctcctagcacactgttaggtgcattgaatgttttgttctgagtaaatggccaagcgaatgaatgaatgaagacagagccatgtatgcagaaggggtctggaagtgagatcgaagaactagaaggcacattggtgtattcctgcttctggtttggggtttgcttcatggccttcaatatgatcttgcattctcctcatgtctagcaccttaaaatccaaaatgagaggccagtgaatcatcacaaggcagaagttagctccagttcttcattatgacatttagcaagcaacattatattccaccaggctctgggaattggggaagacatggggaagaaagatcaacgagaatccttcaatatcacctagrcacccatgccataatagccaagagtaagggaaggaagagaatgaacacgtgtgaccatcacatatattagttaattatcacaacctcgtgagggcaatttttaccaactttttattgttgtaaaatacatatgacatacaatttaccatcttaaccattttaagtgtacaattcaatggtgttaagtacattcatattgttgtacaaccatcaccaccatctgtttccagaactctttttattttgcaaaactgaaactttatactcattaaatactaactctctcttcctccctccctcagtccctggcaatcacgattctactttctgtttctatgattttggctactttagatatagcatacaagtggaatccatttacatttaaagtaattactgataagaagggactttgtcattttgctatttgtttcaatatgccttatagcttttttgtctgccattttcatggaggaaattctgttacctctatggttaagaaaactgaagcttcaagaaattcagtaaactaccctaggtcgcaagaggcagactgagaatcttttgactccagggcccctgatttttccamctacttgtgccagtgtgtttcccaagtactgggaaaattcacacaagcataaaatgtagtcagtgccttgattcaatgggcaataattttcttgagaacattagacagacatagatgaaaggatttctagaagtgttaggaagcccaagatacttgcccaatggcacaaagcatgcatgtcataggaacttggagcaatgttttttgttgccttttataccacagaatgtcactagattgaatcccatggttctgtgcttaatgtcatttgaagggaattacagagatccagccctgctctgtgggatctactccccatagcagatggatgcagcaatacatagtaaatgctgtaataatgtgtacactatttgacctggaatttgcataatgaaatatctctggattcgtgaaaagatttatccatgaggatgtttattacagattttttttacaataatgaaaagtgaaagggctgtaaagattcarcaatcagctaaacatttttacaaggaaatatgatgtagatatttcaaagtgatattgctaaagaatagttaatgacatggaaatatctatatgttagaataacataaaaagtcatatataatatacatatatgcaagtgaaaagtctatattatatatttataatgcacatatataaaatctcattaaattatgggtctataagtatgagtgtgaaaattatatatatgccaaaatattagtggtgattcctgtttaattgtgaaattgtggtcgatttgctgtcccatatctttcgaaccatataataatgcctatgtattatcttaataattagaaaaaataggttatatttagagatggaagtcacgtctaacacaaatctgtcttgagctattgtactgaaaaggaagttatgggaaatgaaaagttctgattatctcacactaactaaatatacatttatttgaggctggagaacaggagtgaagtcattggcatggatcatttggttgcaaggaatagataacttgaggtttaaaaatgtattggtaaggtgtagaatattagaaagtacagttcaggcctcttgaaggaactagaacgaagagacacaaagatatctgaagcgaagtagttattctccccattccctcccccgttccccagtgtgtggtctcctctgtcaatgttgggacatctgcctcagtcctctctctctgatctgactttctctgcttaacagtatggttggcactcaggcgaccttgcagttcaggaactcaacggagagtttctgttgatagttccagatttcacaggagaaagaagatgactgacttagtgtctatcagttcccttttgctgcataacaaaccaccccaaaatttagagacttaaataatcatttagctccaagcctatgggtcagtggacatttctgacctgggccaggctaagctgatctcagctgggccagtcagctagtggatcagccacagagtagcccgtctagacggcctctcctgggatggctctcctcactgtggccccatcctccagcaggctagcccaggctcatttgcatggtagtttcacggctccacgaagaagtgaagaaaacacgcatgccctcaaggtctactctcaggactagcatgttgtgtgcagcacatgctgttggccaaagtaagtgacaaggccagcccagactcgacgtagagaaatagcctcttatctagatgacagcagttacaaaattacattgttgggagtgtagttatagggaggggaagaattcctgtcatttttgtaaactgcacataatctctaggggcctaggctgacatgagctccatgcagtcgctgcaccacattgccatttccatataatgccattggtcgatgtaccagggaaaggtgagtctggggaatccactatttcaacctggaagtgacacttgtcatgacccctcccaacccatggcccctatcagtcacatgggctccattctacagtaaggtggcaggaaacaaaatgagtcactggaatatttggtgagcattatggtctctgccacagtgaacaactcaagagctaatcattcacaacaccagtgtcagaaaggtggaaaagaggcaggtaaaagatagtgctatagagcacatatatgaaaaccacatctaatgaaggtgtcagaaggtacaggaagcccttcaggaatcactagggctgaaggcttggcccaaagtcagagtaagcaggaagaaaatccaaatagttcagcctcctgtaacccagaaacactccttccagactcattcaaagtctccctaagctctagatcctactcccagagctaagtcaacccaagagagtaagaaagtagagtttcagatgggaatgagtgttctagaatcaaktgttrttgaggtcacagtcaggaaaatgaagctgaacatcaagtcccagcaagaaaagaaggaaaaggaatgccaagcagtcatgttagcagtttgaaggggctggagcaagatggaatcaggaataaggagtaagtctaggaatctatgaaattggaagtttgagtgaatccctttagtttaccacttgaggcccacaagctatgaggattctgtgcaatgtctggttgcagggcaggacacaccagataggacgcttgagaattcagacctaggctttccatctcccatgagcgtctgcttctagtcactcattttctcttccctgtctcatttggccttcttaatatctcaccccttgctaactgctttctccaatttctcacagctgagatttagaactcttgcagtatctttccattccaaatccttatagtaagaaggacaaattcattttttataaaatacaatgcacaaaatattartcacaaatgatgaaaagtctccttcaagttcttacctcaaattcctaagccatcatgtggtttatgcctcacagaaattaccatagatcccacatataccctctggggcagctgccacgccctactccacatgtggatttagcccatcttcccatcaagaggaagcaaaaggtgttgatccaagcaccatgctgggtttggggaggcatagaagaaggagggccttgcttgacctgttgctaattgccttgcaggtcagtgggaccatgtacaacactggaagacacgtatcccttcgcctggacaaggagcacttggtcaacatatctggagggcccatgacatacagccaccggctggaggagatccgactacactttgggagtgaggacagccaagggtcggagcacctcctcaatggacaggccttctctggggaggtatgttagtctgtcaaagtactaaggttaaatgtcaacttataagattgggtgcctgtttgtgtccaagatgggataacataacaaagggattcgctctaatctatgaaatgagaaggcccatgccttctttctccatctgtcttttgcaaattgacatcgaagtcaataacaagcttctagtattttccagggaaggctacaatgaaactagctctttccttctgagacaatgttgcagctctcttgagactcatgtccagtgatatttctagagcattatttcaaccccaaatcctcaccttatatatataatacatctttacttacacctatctgggcgatcagcctctcacgtgtcacatatgatagcacagattccataacttttcttttgaatataatgagtcatatttgcataaaactataacatactgtgaaataagtgtcaggcaactcaatagttttcctgagtttctgcaaaatggaaacgtcactgtgtgccaccatcaacccagacagaactcaggccacagcagagagcccaaccacagtttcatttataggacaagagctacagtttaaacagttgtcatctgtggtgtgacacttcacaagtagggtgtaggtaatttgatctgttttacccccrttatactggagggtgtttatgaactagagatcaggggtccttacaggctaaatgccctgtgactaggtttctgcttaagagtcctcaataactgatgttaggaaggctttgaaattacaaaaatatgtattgcatgtggtgtttttatttttttaaagatcatgtataaatctggccttatttttagtgtgttaaggccaagcactaagaaacagacccacaatcttaatgagtccagcagccagattttaatgtgcatccaaaatgtgtcactaagagcctgcctaggcactcagctagttaccagggatacagagatttaaaaaaagggctcctaccacagaggagctcaaagagtgctacattcaagtcattaaagtataatgtcatgctgtaatggggatgtacaaaggccctggcaaactcaaaggaagaagtggtaaattttgcttgaaggggtcaggagaagcttcacagagaaggtgccccttgaactgggctgtaaagagaggcaatgatgaacaattttaagaccatcagctttggagtccagtgacctgagttttgtagtcttgctttgatacacactgtgtgatcttgggatgttacttgagccttctaaggcacagtttagacacctccattttaaaaattaagtgggattccagatgtaaaaacactgaaagtactcaatgattgataaacaacaatgacaaagcaggaaatgagggctagtgcgagcaaaagccccgaggcatgtcagggcagtgtgtgctagagaagctgcatgatttcatctagcattttatctgtgatctgttaatcatgactctataaacaatagggttgagctgtagtatgggtctccctcctggatctgtagggaaaaaaaatactaggattgattagggatgtctkccaaaggcattgtaatgccaggctcccaagttgcagattctgaactagagtacaacaagaaatgtaatgaaagcaggacagaaagtcacaatttgagcataactgggtactgccggtctgaattagagaatattcaaaattagatgaattcttcctcttaagttattttaaggtttgtaattattttatctgttgacttacttgctcatttttttgtttgctgttatttctttttctcccccatattctgtcatattccagcacctatcacaacactgcttcagagtagaaatatttgttaaatgaataattgataaaatgtagatgtttactaggctaaaatctttacattgtattattctttagtgacasttgtttcttcagtatatgataagggtgctttgtaacttatacgtgaaccacaattttagagtaaatgagtgcttccaaaatccttaagggaaacatatagtaatttgatctcttagtgtatgaattttcctagacctacaccagaccacaggtatcaggtgcaccaaagaatttgcattttaaaagttcccaggagagtctgacgattaggtttgtgaagcacttccacaatggtacattattatgtgttcccagtgaagaaagcaatgagtgaagaaagcatgtaagcagggttgcaaatcacaatgaactgggaagccttgtcaaaatattttcctctcagtccttcccaaaaccaactgaatcagtctcaggatataggatccaggtttgtacatttgtaaaactttccccaagagattttggttagcgaccactgtgacaattttaggtgaaactccgcctgaattatcccagttttctaaacaaaggggacttaatcaacaaaatcacactgctaaaaaggggggaaggcacacacattggtaattgtcccctggaaatggcaaggctgggatgctatctagactaatgagacttggagaacagcttcccawgtagggtggtcacacacacacatccactgctccaatgtaggcttgagcactggcctcagcataggtataatctaccttgccctgggtagatgcagtcatcgtatcacatttctttccaagcctctcaatgtcaggggtctatagacgaactggtatgggtttaggtgcaagagaccagaatttcagagtccccgaaacaatgctatatgcaaagtagtgcgataagcagttgacttttgagatcccatttacggatttcagcaagcaagaagagtttggcatcttctgtgtagcataagggaagacacctatggccaatgggtggtagctacaaaaagatggaattcagctgcatatgtgttctaacgatgaaaacgatacagtgatgaaatgagtttgcctctgaaaattgtgacttcatattactggaattattttatttatttatttatttatttagagagaaagggtcttactctgttacccaggctgaagtacagtggtagcaccatcacagttcactgtaacctctaactcctgggctcaatcaattcttttgtcttggcccccccacaaagtgctaggattataggtgtgatccactgcactcagccccattactggagttattaagcactgaacagaatttggtgactccataaaggtgactcacattcgaatgagcaggggaaactgtcagttttaatgtatcttctgatgctgaaattctatacaatccataattttttttttttttttgagatggagtctcgctgtgtcacccaggctgaagtgcagtgccatgatctcggttcactgcaacctccacctcctgggttcaagcgattctcctacctcagcctctctagtagctgggattacaggtgtgcaccaccacacctggctaatttttttcagtacaggtgaggtttcactatgttggccaggctggtcttgaattcctgacctcaagtgatctgcccacctcggcctcccgaagtgctgagattacaggcgtgagccactgcaccaatccatgattttcttatagaaatttccttcaattgtattctactgaggattagcctcagtaaaagtcaacatatctcaccctgaaggttaactttttaaaaaatgaatttcaacttttattatagattaaagtgtacacatgcaggtttgttatgtgggtagattgcgcgaatctggttaacttaatttttattttgtgctaccttcaaagccacctttggcctctatttttggctatcctttgagaggacccaagtagacacttctagcaagaaagcatgtgtttattttgttgacagtgaatgatcacattgccatmtgccctatctatcactgctgatcgtgataagtcaattaatgccaggcattttccttggcacagtgcaacagtcgttatctgaagagctatagattaattgcagtcttgtctagtgaggttattgtaattgatggtaatcatttgctttgttttataaagctgcatggatgtatgacatagtcagcaactgcatttttataaaaattactcatgtcctacacagagaactcctggattccttgttggggattggtgataaatgagcacattcagggattcaaatgtctccatttctttaagaaggaaaaatgaactgtttttaataagtaagacccttagcttgctaatcatgtctaaatggttagattaatgtccagtataaagtaggatatttatgaaaagaagaaaatacattagccagggaaaaaataatatttgaaaagaaacatgccttagattccattgcagtagtgggggctggacaagaagaatmttcctgatttgggatacattagacaagttcatttaaaaatccttccttaagttcttcttttcaagggggcagaagggtacacggagaattgtaccagccacttcatgcaagatctatagccagttcctcctgttaatttcatccactcttcacatgctcttgtgcttctgccatgtggtgggctccgagctaggcatgggccagagtgcagcttctgcccacagatgtgtaaagtctattgagggatgtatattgataataccacataatgtggattatatttgaagcttattccagaaggggattatgaaatagctctcactagatagcattaagcaaagaatgggtgagcagctgtgcaacctgacccacttgctgctccctctgacagcaagatagaaacaccttgaccttgctagctctcagcctctggaatctctgatcctgctcaaaacacatctgagagagggaaaagtccatagctgttgctatggtgatatagataggatgtgtttcattaaaaggggagaattaaagtcatatgtaaaatatggggctttctctcttgctttctctctctctctcagtggctctgaatcagaaaagagaaaacaattatctcagaaccaacaactgaaacaaaacaacagaaaatgcaggccttgtcctcttccaggaatcaattatttgcatccttgagaggctggtttcactaaagcaacacaaatttgtaggaataagcaactaacatcaaattgtcctgaagtgtgctagggtatgaaaagtgctgaggagaacatccttgagagccagggccccattaggcaatgaatggcttgtgaggagtgctcaggcaatgtaattagcactttgctgctctgccacgacctcctggtagagatgctccattgacacaattggagattgagaggaaatgaggattgggatgtataaggacaggtacatggacaatacatatggaagtgctacttatatgccatggtgaagctgctccctctactctgaatgccagccccatctcccttcccccatccaccacagttccccatcatagcttcccaagcccctttctctcctcccagacaggaaggtgctgcctccttttgacttccagaggatcctgtgtattcatctattacaggggtttacaaaccataccctgtggaccaagtccagcctaggagctaagaatggtttacatttttaaaggatgctattaaaaagagagaaactgaccgaccacatgcagcttgcagaagccaaaatatttactacctggcctttttagctgaccccaatctattatgttgcccatcactgtgggttttgtaactgtttaatctcacttctattggaaccatagtcctttgttgatgggaattttatattgatcattgctgtgttcccaacacctcatacattgtctggacttgaggatagtcaataaatatttactgaatgagggaataaatgaccttggtaaacctcttaaggacaagacctattcatctttgcatgccatgcacctagcacagtgcctgacatacagtcartgcttaagtggtgtttgtggaatgagtcattaaaccactgaatcaacaactcagtcaaccatttgtgtcccaggaacaaaaatcttataggcatttttttccctgaaattctaaagtatgttgcctccattcactatacagaaatatacagccccatttaacttgaagatggagtgtttatatgaaggctacccaaagcattaaattccattagaaactgtaaaagaggaagagtggttcagtttgcagttactactaagacatgttctggaatttctctgggaaagaaatatgctttcagaaattcaaaatgtatttagaaggcaccccacctagccctatcccaaatgtggtaaaggacacaaaaggattgaacaattaagcgctaccctggagggatttaagagccactggaaggacaaggcacagacttgagttagttactgtgcagcacaatctagagctcacccagtcatgcccataggtggctgcagaatctcactgccaacacttggccactgttcacatgctttgtggtttaccttcattcattcatccagttaacaaatattgattgtctattatgtgctacagtgaataaaacaaataaaaatgtctacctgtaaggtgcttatagtctagcggggggagacagataataaataataaacataataaatgagtaaatttacatgtaaatttagaatatgataaatgctatggagagagaactagagcaaaacaagagagatcagagaatgaggagtggaaggagtgagctacaagtttaaatagtgtggccagtataggcctcagtgagaagatgacatttgtgaggttgccagggagatgtctggggaaggacattccaggcagaggcaatcgccagtaccatgattttgaagtgggagggagctgtgagcatgcaaggaagagcggaagcagcatgagcacatgtgtgagtgatggggaaggaggtcggagaggtcagagcagggccagaggctgctgcagaccacgtgggtcctctctatgtgcactttgtatggactttggtttttactctgaataaattccaaagcacagagacagaaattctcccatttgatcataaacctcaaggcggttgctctcaatgttaccaccttcttggggaaacaaaggcccaagaccatccaggcaataaataaccaagattggacttagttcgggtcttctgattcataacactgcctaatatagcccacaatttatccataaacccaatacgaatgattacgcatctgctctgggccctagcttggtagggaaattcaaagactgataggccatagtgcctacctgtaaggagcctacagtatagtagaggatcctgtctttccaatcagactgttaactccctacagtcacagagtatgttgtagtttttaaatatctccccatacacataatgggcacagggtacgtattgctgagtagagattaaatgagtaaatgaagataatttaagaatgtagctttcaaagtacctagattatacccaatagatcatgaattaaattgtatagtcataatggcaaacctaataaagttgtcaatattaacagaggttctagaattttttatgttaaattattcacaaatacaaggtaagtaaattcgkagtacctgggagaaataatggaacaattgagaacctgtgtaccagaaaaattcatttagattcctcatttcagccctggaattactcctaggatcagactaaggagctttgccaatgctagacatcaaatttctagattctaagagccagtcccaccagagtgagcaaactggccttcgagaagcaaagcagaggcagaagctcagatggtggtagggcacattacagcaataccagcaagcatatgatgactctgatctaaggagaggaagttctccctctggacatttttataattacttctgggaaagcacagcccaatcaagtcagcagttcctgaattgccagtattggatagtcactagtgcagcctaagagagagggcattgcattagaagacagcctcctgcggtcaactcattatcccattgactccagcctaatctgcatcataactctggcctggacccccaggatggcatatgacagccaccatcctcctccacttgactctgatctccctgctgatgcttcatcggaagaaaggaggaaggtgttacattacaaaagacaatattaaagacaggcattaactggaatttgatcagggttctgcctcagacctgtcaccatggagaccatggctattatcattttacaagtgttgaatgaggccttcgtttatttagtaaccagtgacactgcagttacaggcatgagtaccgctcacaacatttccgtgaactagctgtgttttttaactcatttccaacgctgcaggaataaaatcaatttgaaaaagaggtgttaaataagaatgacctatattcgttgggactctgatactatcagtggccaatgaaaatttgtagaggttccaygaaaggtcacatctctcacttccagacatagacctggacttggaaaggacaagtctactccaagtgtccatctaaagtgacagtgtcagaggaggaacttttgaggccatctcttccagcataccccctgtgtgtacaaaggaaaaatcaaatgccagaaagggcaagagacctgcccaaggtcacagagatttagcggcagaattaggaccagaacccaagtttcctgactcttaattggggatttttaactttttaaataaaatttagaattctgtcaaatcccaagattcaaaaaaccttcttaggtcacctggtttagtcacctcatagagcaaatagagcctgagaatcacatttcctgcatttgtgagcacagccccatcgcaagggcatctatagagtcagcctcaaaacagcaaagacattgggagattatttcacaaaacataagccatgatgagcatccacaaggaagtggatctagaaatcaccaaatcacccctgagaaaagaccaccaatgtgagagcgagccataatagtgcctgattgagataaatgtgagaattaaagattggaagactaaaatatagtgtcttaaatgttcttccttggtctcaatatgaaaaggcaatcatactattgcattaagaacctaagaacagaagcaatgcttttgtgcagtttaaatctcccccgcccacattcccccataaccctccagaacagttcagtaatattaaatataagtaatccagataatattgctaaattaaatcattcgatgtctagctgctccatggatgtgctgctctacaattcaaaataaggccatttaaaaccaccggatccatttgcactgacatatcgataaacttttgctgaaacaaagctaatcatttcaatggtgccaacttaattgctcgccagttgacagataataaacagacctgaggattaaaatatgaactaattactgtactcaattccatttacttgatttcatgttccattaattttttgcatcatttctggtggaagccttagatttatggttgccccaaatgaattatgccacttagttgcctgtgccatgctcatattcagaaytggttggaaagggcagaattctgggcagtaaatatttagccgaagcagcctaggatatagtaagtgaaggtgattatccattcccaaataccagccacagtcagcctctataaatctatccccatctctgcagtaaaagggcaacagtagggttactgtcatgattattcattggatctgctggtgagaggcacactccaagagcaatggttggcttggcctggaaggggggctgtagggaagcagggacaaacacactaagggaaggacaatggcctaagagttggacacttgggccaccagacagaaggcaacattttgacttaraagatctgacttcagcactcctctctgccacttattggctgtgtgatcttggaaaaggcagaattcagtaaactgctttggctttttgagtctcttaaactgggagatggagctaattgtgctggttctatatatatattatagggtaattgtgcaatgcaaagaaaactcttctgtgatagggctttttaagccataaagtgctgtacaagtcagttagttattggctagccaataactaagttctaaggttcaccttagaactcatctagcccaaactgaagataagatacattagcataaccacggtgaactaaaatgacttctaccatcagctgtaatttattgagcatgtactgtgtctcaggcattgtgcttagggccttatcacacccagtsctcacaataagcttttgagctagcacttattagcaccattttatattcaaggaacagaaacctcgagaggttaaagaacctgctttcagttgcatggttggtccagggaagagaacccaggtctctgactccagctatgcactgagtgaccttagacagtcaccttacctctctggctctgccactaagtagctgcttgatcctgggtaagtccattcttctaatcataagtgcctgattgtgttacctgagatgatcttccagttcctctcaattctgcatcagccttaagaacagtctgcactgtttctagctgtaaagtgagacaggagcctatttctccaagtagtacagcagcggtgtgaaatatgacacagcatcattctgtgttcctgcggaggaccttcattccttcattcaccttctcctcccagatggacagctactgggaagttacagttcccagatggaagctactgtacatgcagatgtacagttacattttttctctcttctttataacaagcaaggcattttatgtgtgtaaatttgtgtataaacacatctgtttgcctctgcaaagcacaagaaaccatattccttagtctcagaggtagcttgggtgaattcgtcatcttgctttggatctatttgctgagctagaaatttctggactcagccttggaaatgaatcctgcaggagctatttggcaaaatgagcttagccaggaggttttaaatcacactcccagccaggaaaarggggaaggcccaggggccaccagatatctgcatcaggacttagcatcctggcaccagtttttcaaatcaagtaattgtgtctgctttgggaaagactaattgtgtgtggactcaaatggtcatcccggaacagctgctgtttctgtaaagtcctctgtgggggtcaagcattttctacctgttgcagctgcctctctagggctaatgtgttcccatgacccaggttaagggccatgacctacttgcatgagcagctgttaattgtggaagtgaaaattgatggaattattcattcctgtgtttgaatcctggctctatcagctgtgaccctaggcaatttattcaacctccttgtgccccaatttcctcattaatgggacaaatatgagtgatgtccwttctacagggtggtttcccccagttttgttgaggtatggtttgcatacaaaaaaaatttaagaatttaaactgtacaatatgatgctttttcacaaatacatagttgtgtaaccatgaccaaaatggtctagaacgcttccatcaacccaaaaagtttctgtgttcttctgtagtccttccctcctaccctagccccggcaatcactgatttgcaatcactagagttttgcctttcctgkatttcaatccgtggacttatacagtatatagtctttttttttttactttgttttttaagttatacagtagaattaacttttttattttggcataaagttctctgaagtttaacaggtatatagatttggatgaccatcagcacaatcaggagacagaacagtttcactttgcagagtagttttatggattaaggggatcaatgtataaaaagtgctcagaatagttgtttgcacagaatgagtgctcaaaaatggttgtttttattagcaatgacatgcttcttcaagctgcatcatctgtggttcacatttttttccaaataatttcaacttttattttagattcggggtggggggtacatgttcgtgtttgttgcttgggtatatctcgcgatgctgaggtttgggatacagatgatcccatcacccaggtactgagcatagtacccatcagtcagttcttcaacgcttgcttccctctctccctgcccctccagtagtcctcagtgtctgtcggtgccattgagtacccaacgtttagctcccacttatgagtgagaacaggcagtatttgattttctgttcctacattaattcacttaggataatggcctccagctgcatccatgttactgcaaaagacatgattctgttcttttttatggctgtgtaatattccacattgcatatatacagkgtcagcatttctatcctccatccatatctaacaagaatccagagtagcacccatgcagaaggtgaaattcttaaaaattacatgagcagttgtgagttggttcctgaaacccttattctaagaagatgggtnaagggcccttctaatgctgttttcttatcagtgtcaaggcatcctgctgtaaggctgccaggagaaaaagcctcctccttctttcccttttgccttccgccatgggatgacacagcattcctcccctccagaggatgcagcctccaccagagaactgagcctgctggtgtgttgatcttggactccccatcctccagaacggtgaaaaataaatttctgctctttataaattaccccatctcagatattctgatgaatggactaagacattcactcaggcctgcagaagacagtcaagcccctactaaccacacttaattgtggagaaaacccatcagcctgaggtcctgcaaggaakcgccctcccattcctggcctccaggtggtgmccttccctgcccccagatggcagtttattattgcaaagaagacccgcaaatagaatattcctcattccttgtgagtttgaagcaaagccctgagctgtctaaataggatgatcacctgccctgccttgcccgaacagtccagtctgacaccagttaagtcctggtataactgtaatattatagtacatcctttcaccttcaaaagtcctccagtttgcacaatgaatcatatgctcaccctacgactaggtgacctttggcaagccacttaatctctctagatctcttttccttcatccagaaatgaaaggactagagtagctcttccagcaccaagaggcctatggaagtaaaatcttcttgcacaagtttgccatcacgtataaaccattgattaaggagtcatgatgctatcttgagagtcagaaacattgatgtgtaataaattatttgtgttacattggaacccccccccccaaccaaagattgagtacacactttgtaaccatcctcatacctcctttaaggtaaaatcttgggaaattaagacatttgatgaaaaagtaaagctcagattgttctgctcacttggatctgcgaccttttcttgtcgcaatattgaacctcctgctcctgccactaccatactagtagctttcacacacacaaaccccatcacacctcagtcattttgcacctcccrggtaaaacgcccctgtgattaataaggtattttactagaaactctaggttccccttgaaccattttgctttgtagaattaattacaagttaaatgatttctttgcattgaacacccctaggaagcaaccccaggaatttatcagcatcatctacttaggttttgtttcaattctggtctttagagagccgaaacagtaagaagattctgtcacctccaactcctccgtgaatcctattggtgtcggcatttagcctcctttgccatcaaacaaaagagagaatgtttctgctccaaaaagcagttgcaagctttgcttttaaaacctcaggggcatccaaacactcaatcctacaaagctctagtgccgcttctggagtattcatttagcttgatttacattattttaattttcttaggggtgtctttactagctggagggtgatatttcccccttaattaaagaacaagttgattccaaagcactcaaaacaagcccctttcaaatcctgtctcgcttgtcactttctcctgctgttccctgtcttctgagtgcttttcagcttcccagcctccctgccttctcaaactggaaacgagacggaacaacagtgaggcgaagcgtggctttcaatggagccagccagcccttggctttaattcatctaattccctggagcgtgtggcaatttggggaggaccaggtagtgttattgctatctcatagaaaagctatattaagttagtaaaattcaacaaaaattcatataactaagccaggaactgtgctaccttagggctgcacccaagaacaaatcctgccactgtcctctgggggctctagttcctgacggcatcttaggtaaagtgctttggggggcaagtaacagaaacgcactcaaatggggttaaactaaaagggggatttactagaatacctttgggatatgtcatagaactcaagggtaactggacaaatgaaggaactggaagccaaaactgaaacaaggttataagccagggactcactcctactccattgcccatctctgcatgacggccttattctcaattctccccatgagctgtcttttttttattttttattttctgtgtatatagagggcagaaatggtcccacttcagctcccaagtttatgttcctttggcgcaagaccttcttgtactgactagctgtctggctctttatcccaattccacattctccaaagaagaaatttggttttccccgagaggatctgatgtcctctctgacccaatcagctatccatgtgggatgaggtagataaataggtcttggttacctgcctgtatggtggggagaacagttatctggtgaaggcagacactgtcggttatgcagacaccctaaaagatgtctgccacagtgggaagatagacagttctattcagatcagcctgacaaaattcacaagctcaagtgctgttgacacatccgactcaaattagggggatggagaaggctttctgacataagccggatcttgaaagagaagcatgaacataactgaaataggataaaagcatcccagacaaacaggagtgtcacccattaatagaaagaataactataagcaatccataatgtacactcaaagaatttagcatcttgtaattgagtgtcacaacagtcttcctcatcacagggactcagtggcacatcacagccatgtgactcatcttcctggctgctaacattgttctccctctccttcgtttctgccagtcaatgtaaaaatcacagggtgggctcagatgagttgctcaggcgttaacattagcttcaagcaagcacatttgaatgacagctctaccacctactgtgtgccttctgataagttatctaggctcttcctgagtgagaagaatggtaataataataataatgatgtcaacctcaaagggctgttgttgggataaaatgagttagtatgagataaccttagcactggatctggcacagagtgctagcactttgggaggctgaggcaggcaaatcacttgaggccaggagttcgagaccagcctggccaacatgttgaaaccctgtctctactaaaaatacaattagcccggtgtggtggtgggtgtctgtaatcccagctactcgggaggctgaggcacaagaattgcttgaatccaggaggtggaggttgtaacaagccaagatcttgccaccatactccagcctcggcaacagagtgagaccctgtctcaaaataaataaataaataaatcttttttttttttttttttttaccagcccctttcctctgtgtcttttccagtagtaggctgatgagatgtcatagattttaaaaatgcggactttaggtatgtggtctaacatagggacagaatagttaaaacaaggactccccccaccaccaaaggaagttttctaacataattgtccatcagatatgtccacatctcttgtctccctgtcagtttctagaactcagagcaaaaagaattgtttatattgttccagattactcattgaccagaatccatttccctttctttttttcttgagacggagtctcgtcctgtcgccaggctggagtgcagtggtacaatctcggctcactgcaacctccacctcccgggttcaagtgattctcctgcctcagcctccagagtagctgaaactacaggcacatgccaccatgcccagctaatttttgtatttttagtagagatggggtttcaccatgttggccacgatggtctccatctcttgacctcatgatctacccaccttggcctcccaaagtgctgggattacaggcataagccactgtgcctggccccatttccctttcttgatatggagcctgttaggtgtgcaccatcatgttcagccaatcttyctagctccctgtcatccacacccagtcagggaccgtcttatccgggcaaaggagattggtctataacaactctatttagtatcggtcctttccaaggtactaaaacaacccaagcacttttttttttttttatccctgtgttgacttatctttktaacagtcccagatgtaggacactttccaaaaaccttttgaatatttaagtctgagatatccccactgggatagttttcccattattaatgttttgaaaaatgtcaacaggttagaaacacatagctttcttgcacagaggctaagcttcatcaacattgcaggttatattatttaatttttgtgctcattttaattaaaagtttagttacagtggacctttaatatggaagatgcatttttttcatactggcatgtatttgatttcttttctaaaggaaaaagaatgtttgcttgagttcagagctggggtcagggtttaatttacaaaaccactactttcttagctatagcatgactcgctttattgcaaacacatgttaattcctttaacctcccttaagtccctgttgattttctggccacatttacaaaacatttctatgaggaaataatgcccaaaaagtgtagaaaaggaatccaactaaggaaaatagattcctacattacagtctgaccagtgtctctgatgccttcctcatcaaagaaacagaagaatgactaatccaaaataatgaataatccaaaactctgtataatgaataatattaattcctcacagatacctatttgagttcctactgtgtgaattattttgccaatctctaggttcaattatgagtaattcataattcttgccctcagggagcttccattctagtaaggagatatttacagtctttctttgctgatgttgtgctaggagaaggcactgtctacaataggagtcctccacactggagccactgctagaggattgtgggtacatccagattgcttagacttgactcttggctctgctcctggtactagccttaggaaagttatttaccactccctgcctcagtttactcatctgtaaaatgagaattattgtggtactaacttaggcctcactgatgcattttctatgctgattcattggccatttaggagagattcctattcaagacttatttccctttatctgaccacrtggattgacttgccttttattttctctgaaaagaaatgcaacctcaatatccacatccacctcattagagaaagcagagatgtatgaggtttagtagaaactatatgatatcatayaactcatgccagctggtaggaggcatgatgcatatgcctctttagtcaccagcaaatgaagagggagcagaagaatttgctaatacctgaaatttaggcagtgtctaaagcgtggagcaaaggaattgattgcttgtcaacttggcagtgataactgtcagaaaaaaacaaccttaaggagatgggtgctaaagagtcacagttgcctattggcttttcaagcatgcccagttagcttaagaaagtttccaagcccatatgaaaagtccatatgcagtgggcttccctctaacccacgtgccaatacttctagggactggggcacctactcactcactgtgtgtttgtttgtgtgtgtgcatgtgtgtgtggtgatacacacacacacacaaaaaagtttaagcatctgaaaagatgacattgaataaaaccttagagaagtgagggagatgaccatgagcgtaaaaaggagaacagtttctccataaggagctgccagcaccaaggcctaagtgtggagtgtgcttggtgtgtttgaggaatagcaaggtgtagggtggggctagaggtcaaatgggggacagattgtgcagattgtgtgggccagtgttgggactgtggctttccctctggtggaacgggagtcactggagggttttgaaaaggggagaggcatggtctgatcatgccaagtttgctcctgcactggaagctgttccctctctctagcatgctcctccccctggtcttttcatggccaactccttattatttggatatcagctgaaactgtccctaaccacccagtcactcacaatcacatcacttagttttgattctctgctcaaaactgatcattcattgataatttttcatgtttatttactccattattttctatctccttttacttaaaagcaagctctgctaattcccctcctcttcagtgtggtgggcaggacttagtaacttccttccaaagaaaagcaaatggaaaataatatcttcacagagaaggaacctggcagacaccacctgggccaagtgatcaaagctaactgcaccagggacgtcttgtggatattgggtacctctgatgcgaagagaagggcactttcccctgtgatatgtatccaaaaatccataagcccagaataattgtaagagagcatcagacaaacataaactgagggacattctacaaaatatctgataagtacccgtcaaaagtgtgaagatcgtgaaaagcaaggaaagactgakgatctatcacagattggaggagactgaatagagatgacaactaattgtatgtgagatcctggattatatcctgcaacagaaaaaggacagtagtagaaaaagtagtagaaactgaayatagtctctaatttagttcatagtgttgtgccaatgttaacttcttagtttcaataaaaaaaaaaagttaagggaagatggatgaaagttatatgcaaacttcctgtactatcttaactcttctacagatcaaaattatttcaaaataaaaagtatttaaaggtctggcacagtggcttacacctataatcccagaaattttggaggctaaggcagggatcacttgagcccaggagttcaagaccagcctaggtaacatagcaagaccttgtctctaccaaacaacaacaacaaaaaattagctgggtgtggtggcatgcacctgtagtctcagctactcaagggactgaggtgggaagattgcttgagcccaagtgttcaaggctgcagtgaactatgatcatgccactgcattccagcataggtgacagtgagaccccgtccttaaaaaaatttttttaagtctttaaaaaaaaaaagttctgcaaaagtcttttatttttaaaaaagaaagttctgcaataacaggggcatcgtctgtcttttttcactgctgtgttcctaatgtttagaatcataataggcactcaataaatatttgataaataaataggatggacatgaagtaaaatcagtgatagcatctttaaaaaaattaatgaagcatttaaagtgctttatcaaactcaaagtactttgcaagttgctatttacaaatgtaaggaaatatcattattatcctattttgatttttagaataggagaaggactgcccacttcctgaggcatagctgtaaaaagtgacagcttagcccaggacccacatgagccactgtatgtgatcaaggcatttctgggcatcactcacatggagccatctctgttcataaagatcttctgaatcaaaggctctgagacaaaagaaacttcattttaaagtaaaaaaaaaaatcgtcttggtgacatctcattaatctgggttcattaaaaatgtgtgggatacccctcctactccacaggtgattattactctgaaaacactcatcagagatggggggaagacctttcctcctgaagaattaaaagtgaaagcaggagattacatcctctccactcccttcctcctcacccccgacaaatgccaactgctctgtgaaaggtgtcctcagaaggctctggtaggagatagtccattgctgaggagtctccacttttgaaaatacaaacttgcctcccccaagatggtgtggaggcaacagggagagagatgaagaggtttagcaaatagctgaagagtgggtggcattgagacaaggctgcaattgacatgcatcacacacccatgatgtccatctatccagctgcctacaacaaacagggaagcagctgatgaaaccagcaggccactaactgagaatcagaagacctgagttctgatcccacctgtgccaccaaatgatttcattaaagttcatttcccctttctgagcctcttgtttgtcaaatgagggcagttctctgaaaaatctctaaagtctttttctggctcattctagatacatgttaaatatttttaagtactctgttctatgcttgtcatagtaggggaacagaatatatatagaatatgctctgtgctttccaaaggctaccagtatagttaaggggaaaaaatagatatccattggagagttaagtaacaacacaaggcctagttgattaagtatagacagataatgctacagatttttttatatatattttaaaaattttcaactggcaaatttaaaatgtatttatttttggtgtataacatgttttgaaatatgcttattttgtggatgggttaaatcagtctaattaacacgtacatcatcttgcacacttatcgttttcttgtggtgagaatacttaaaaatctactcgctcagcaactttgaagtatacagtgcagtatgttgttattaactacagtcactgtgttatacaatagatctcttgaacttattcctcctatctaaactgaaattttgaatcctttgaccaacatcaggattattttaaaaggagagcarggggttacctggaatagtgtagatcagcctctcagagaaagtgggactcgtgctggacttaaaggaggcatcacatttacataaacagagaatgagtatttcccagtttcttctctgaaaaccacgtttatccaggcctttgcataggcattcatctgcccagaacgctccatcctcctgccctgtttgcctatcaaatcctacttctctttcaagattcagtttaaatgtgcacctgagctatgaagacttctccaaccccaccagcatcactactttcactccccgacagggtgaatgactctttggggctctggcagaatgtgtaagtgtgttctcattacacttcacatttttttgtacctagagggtcttcccacccccaagacagttcagggttcctgtctcgcttagaacacagtgtccagcatagagtaggcactcaataaataatgaatgcacaagtgcacacatatatgtataaagagcaagcccagggcccattacagctgactgtgaacatctgccttctactcaagcctgagaaacaagcatgtgggatgggtgcagagaaagggcagagaaatctcaagagaaaaagggtctctctcagtgagctgacacacccccccaggatgctggagaaggagagagaaaccaaaaatcattctttatcaatcagccagcaagtggccactgggtacctccctttgccctctcccacatcctagggatgtgtggagacacccaagagggctgcactgctggccctgccacagagagggttactgggaaagctttccttgccttgttgatatgctgggccactagtggtacacacttccctccctgaaaagtaagtggctcacgctgatgtaaccttgacatttagtgaaactamaaaagaggaaggtgtgcattctattaaagttcaagccgacagcaatgagaaaaccaagaaaccaagccaacttactggtcctttctcatatgggttattcaaaagctattttcaaaggggctccggcccactcatcaatccttggcctgtccaggtgcaaataaagagaagcacaccagctggtcacagcaacttgtgtcctgtcctgtgcagaagccactgagatatctrcatggagcaggggctttggaatcagattmcagtcctgtcatttactgattgtgtggccttagacttcacctcttcgagtctcaggctgactatttgtgaaattggatataattccttttttgctggctcattataaggaatgcatatggtgactgttgaggaccataaaactgctcctaccagagctggctccttgtaggcactcaacagtgaaaactgttatgactacattagctattactatgccctttatcttcaggtatttactgagcggccagtagactcacaccaatgtgctgcgccctggggaagcacaaagatatttaagaggggaattgcatggaaggaatggaattttccctgggtcttcagggataggcatggtttagtttcattctcaagtcaggaagagaaatactctcttttacattgtattttcagttgcaaaccttcatctctttagagagcagataattgtttttccacattgcacagatatcataatgatattctgagaaaacaaaatttaaaaaaaggaaaaatttacccaccgttttccaccccaacaaatcaaagctgcttttgatttctgaagttcagagtgagtgcagttttattaagcaaagacagagtgaggaataacttttcattcagaagtggttgggcctcttttacctcatccaaagcatggaaattctagcccatcttatacttttgttggcaactgccggtgtttatagtgagcccattctgaacattcaggttatttgaaagtgcatatcccaactagaccctcctaagcacatatatggaaaagtttccttaagcaggaaataagcaggcagaaccaaatagcctcaatacatctcccaaccaaggaatgtcacttattttggcaatatttcatattccatccattacagaattcatgagaatgggtgtgtctgccactctgcaaggacagtaatagaaactgcacttgctggaagttctttctttcatttaaaataactgtttactgaatctcacactttctaattctatccaaaacctcattcctctccagccccctcaaaattccaaacttccagtcccccctcatcctcctgattactatttgtcaggcctgttcatctgccctgcagcaccgttgggagccagaacccagggcaagggatgtcagagcccttggcttctctcgcaggtgcccagggcaatgccaggtaccccatgggcacccagtaaacatgggctggctggctgcagtggtgccccagctaatgagtgcaaggcttttaatctgtactcagaaatgtgaggacagatggaaaagagggcagaggggaaaaacagcttcacactgaagtccagatagcattgcacagcgcatgcagcagacatgaaggattctgatttcggcaaagataaaagggtcagcaagcatgctatctgaatgacaagtaggctaaaaaagatttcagtctaattctgctttttccccatcaaaggaaagatgaactgagtttcaaaaagcttccccagagaccatatgtatgtcattccttgatattatacaatgttatttccctaaagtgtgtgtctttcccatagatgatatctgcgggagcactcagtagatgccgtcttgtcctgcatggtacccatcaccacatcccaggcaccaatcccaggcaccagtagcacttaccragtgttcacatcctaggttctgaaccacgtttctcatacggaatccatccttttcttgaaccttttggcttcaacttcatgattcatcctccaatttcatccctagcctcaccttttgaacttgacattcagcgctaatttttagctgtaaccttgatcctccctgtcacagttcaagttctcccaccaactacatgtgctagtctaggttgagtaagcacatgcccaggattgactcatccctcacattctyctttccttgggctcttattgggcaactgtcccatttggtccagtcccacacrtgggaagcaggcagcatcttgaaagrctcattaataaagctgagtgttgttggtctaattacacttttccaatctttgcctcaacaggagggaaactaacttgaggaggagtctatattttacagacagtggtattggcagggacgggggatggtaaaccctagatttgctatgaagaaaatctgcactgggggcctagatgatataaccaaaggagaaagtaccaaagtaagaagacaaatgggtttttaacccagttctaccagtgaccatgtggctttgggcaaatcacttcctgatccaggcttcattttcccttcataaaatggagggattttgccacatgatctcccaaatgccctccaggtttaatatgctttgattcttttactgtagtctgtctttctgagattccattctctcatttggaaaatagtgataatatgtctagttgaaatgtcctcccaaggctaatgtgagtgtcaaataagaaactgtatgaaagtccatggcacactgttaattttggtaaaggagcaaggggacagggggccctgaggccatcacacaacctactgtttagcagagttacttacatgagctgtgactgcaaaaatatatccctctttctcatttcttcaattaaagaaaacttagaaaacacatgaaatagaaccagattacaggatacccatatcagtcctgttgaaaagatgcttcttaagggtaaaatgtcacacacacctacaaatttgcaatggaccttaatgttggagcaaggaggtgggccactggaattaggccagatcattgaagtggctggggaggcatgagggagaataagcattcatacagtgctattgccttctagtcactctcggtgcattagacaattcagctgtctctgaaatcatgctgtaaaagcataattcattattattattattatatgttttttaacaccagcaaattctccagttctccaaacaccagctgacggttctacaatttaattcaattctaagatttatctacctaaagttaacatcagatcgcaagagttaaagtgtttasttacatcagactcctcctacttcagaggccaatcataagtctaggcctcaaactgactaagcaactataaatcctacaacccctcttcatgtttgataatttgctagaatgactcacagaactcaaggaaacataataactctggtttattataaaggatacaactcaggagcagcgacatggaacaggtacacagtgtaaggttgcagcaggactagggcaggggcgaggaatatgcagaatatgcatgaagcttctaggccttctttgggtgyaccaccgtcycagcacctcartatgttcaccaatcgggaagctcatcaaatctcgcgaagactttttttaaaaataattatgacccctcaccagatggataggatttttttttttaattcatacatcttaaagtttattttcaactggccaggtgcggtggctcacgcttgtaatcccaacactttgggaagccaaagtgggcagatcacttgagctcaggagttcgagaatagcctggccagcaagtgaaacccatctctactaaaaatagaaaaattagctaggtgtggtggcaggcgcctgtgtaatcccagttacttggaaggttgaggcaggagaatcacctgaacctaggaggtagaggttgcagtgagccactgcactctagcctgagtgacagaacgagattctgtctcaaaaataaataaaataaagtttatttatttttgagatgaagtctcactctggcccccaggctgcagtgcaatggcatgatctcagttcaccgcaacctccacctcccaggttcaagtgattctccagcctcagcctccccagtagctgggatcacaggctcgcgccaccatgccaggctaatttttttgtatttttagtagagacggggtttcgccatgttggccaggctggtctcaaactcctgaccttaggtgatccgtccacctcagcctcccaaagtgctgggattacaggcatgagccaccacgcccagcctaataaagtttatgtttaactgacaaataataattgtgtatatatgtgggatacaatgtgatgttttgatctaggcatacattgtagaaagagtaaatcaagctaattgacatatccatcacctcacatcatttttttatggtgagaatgttaacaatctattagcaattttaaagtatacatacattattattaacwgtggtcaccatagagcagagcataatagatcactaaaacctattccttcagtctacctgaaattttctaccctttctccttccctctctccaccaacctctggtaactacctttctactctgtttctatgacactgactttttagattgtacatataggtgagatcagttggtattcatcattctgtgcctggcttatttcagttagcataatgtcctccagttccatccatgttgttgcaaaacacataatttccttcctttttaaggctgtatagtattccattgtgtatatataccatattttctttatgtgttgatggacatttgttgttcaagactttttatagagcttatatctccagttttcagactggtggatgggactgaagtttcaaccctctactgagttggttctggtgaccagcctcttcctgaggctatctagggtccccaccttaagtcacctcattagcataaactcagatatgattaaaagkgttcattatgaataacaaaagatactcttattcaggcatgtccactgcttccagtatataatactgtgctataaaaggaagtgcagaagacttcctcactgcagtaggtttccaaagatggcaggaacctattgcatagattactcaatagaataattcattctagatgtcccatcctacttaagattcctcctgcctacatattccaggccagaaatcccaagagttttagaaattctgtggcaagaaccacagacaaaaaccaaataatatttcttattataccacaattattattactcttagtattattatcatcctttcagtgctggaaaaccagggttcagagattttatgcctattatgttctagagttgagcaccaaactccagcctatctggatcaaagcccacttcattgcctccttaaaaggctgcaaaagttttttgttttgttttgtttttttgtgacaggccctggctctgccacccaggctgcagttgtgggattacagctcactccagccttgaactcctgggcttgtgatacaccccccacctcaacttcctgagtagctgggattacaggctcatgccaccatgcctggctaacttttttttactttttgtaaagatacgatctcactatgctgcccaggattgtctcaaactcctggcctcaagtaattctcccacctcagcctctcaaagtgctgggatttcaagcaaagccaccacacccagccaatacttaaccttttaaatcaccccaacataagactgggatatcatgaatgaaagatatctgatgggtcttaacttctcttgaacagaggcagctcttcttcctatttgtaaacatgccaaaaacattttctgagacctgctgtgtcccaaatttgtattagatgctgggctaygggggaaatacaccatggatcttcccttcaattccccaatgactcaactttctagtctacttttcagcaacaagcgaacctcaggtgtcacctaggttcagtggtgagaggtgtagctattgcacaagttttgtgaggacaagttgaaaagaacaaggaggagccatctgggagtttaaaatttcatgccttcatgcctcaatttgcaggcgatgtcatgcatcatttatgtgggggttctggtggcatttattttattcaaagcccatttatcctggactttttccagtactgtgtgagattttatgattcatcaaatccctcttctccgtaatgtagttttgcacacatgctgatgtgtggtatgctcagatgagctctcagaagggaataaagagctggagtgaggtcagaggaaagtgtgaccaattttggacctggccatgcttcccatgtgtgatgctgtgctataagtagaggtatagaagacatcctcagggcagtagtatgagatatggagaaaagaaaaaacaaagtgtttttttctatcctctcattcaacaatcaacacttctgtgacctctggttgccaaaacacgtgaggatttcttcccacggtcaaccaagcaatcaattctgcagcagacaccagctgggtattctcttattcaattcaattctgacactatctacttggagatagcaacagaccccacagatggagggcttagttttccccccacttcagaggccaaataataagcacaggttgtaacccatgttcccatgaccacttttttgggttcaattaatttgctagagcagctcacagaaatcagagaaacatttaccagtttactacaaagggtattacaaaagataaaaatgaagagccggggggaataactgtatagggcaaggtatggggaagggttgaggagcttctgtgccctctccaagcccactgccttccaggaacctctagaactcagtgcttttgagtgtttattggaggcttccttacctaggcacaattgattaagtcattggtcattggtgattagctcaaccttcggcctctctcttcttcctggaggttgaggtggagctgaaagttccaatactttatttttatttatttatctatttatttttactgtaagctgctttggcttttatttcattttaaatctttttttcattttaaatctttttttcataaattattggggtacaggtggtatttggttacatgactaagttccttagtggtgatttgtgagattttggtgctcccatcacctgagcagtatacactgcaccatatttgtatgtcttttgtccctcgtccccctcctcctcttccccccaagtccccaaagtccattgtatcattcttatgcctttacgtcttcagagcttagctcccacatatccgtgagaacatacaatgattttccattcctgagttacttcacttaaaataatagtctccaatctcatccaagtcagcaaatcctgttaattcattcctttttatggctgagtagtattctatcctgtatatatatatatatatatatatatatatatatatatatacacacacatatatatacgtgtatatatatacacatatacatatatacatgcatatatgtatacatatatacgtatatatacatgtatatatacgtatatatgtatatatacgtatatatgtatatatacatgcatatatgtatacatatatacatatatacatgtatatatacgtatatatgtatatatacatgcatatatgtgcatatatacatgtatacatgtatatatatacacaaatatatatttttatatatttatgtaatattawatatatatatatatatatatatatatataccagtttctttatccacttgttgattgacgggcatttgggttggttccacgattttgcgattgtgaactgtgctgctagaaatatgcgtgcacaagtatctttttcgaataacgacttcttttcctctggattgctggatcaaatagtagtactacttttaatcacatggttcattttcctggccaacaggccmatgttgggctagccaggtgcccaccaagagtcatctcattagaacaaaagatgctcctatcacccaggaaattccaagggatttaggagctctgtgtcagaaaattggggtcaaggaccaaatgctaaaaaattctagcacctctgtctacaggggtattcggagctctctctcaggaacttcagcagaagccaagcattagaacaaaaaaattcccctagcactcctatcactcaggaaattacaagggttttaggagctctgtgccagggactggggacagagaacaatatgtatatttcttattatttcacaagtgagggttccaaagatggcagcaacctattgcatagattactcaagtaacactataattcatctctctgtgtctcatcccagttaagatctccctgccaacattttcaaagctcagaagactataaacttgatgaacaaatgctggccctaccatgaccttgaccaaccttgggctttctgttgaatgaaaaaccaatttcctatcattgttcagtaataggtcttaagattgaagggtgcataaaggaaaggattttatacctaattcaacatttattgaggcctgtaattcactagggtacayggcacatgcttaaataattcccctacaagatgctatggagggaactgcagcttaatgaaccccaagttcataccttggtaagtggtgagacagtatttgaaccatgtcactgacatcaccttaggggcagccctgctacccactccaaccagagctcaaccctggggggctggcaagaaccaggaggggacagagaagttagccaatgggtgaacttcttggcattttttctcttctttttttctctgaataaatatcatttttcgaggccaaaaaaggggagagaaccatgagcattttagacatccttttatttgggggtagtttcttgcctcaggtgtgcttctcccaaaaatactgatccagttccctcagattagtcacgtccaggcccagggctcttccatcccaacccaattcccctgaaaatgattaaagagtctataatatatcactcgatctcatttgctggatcaaatctagagggagaactgctgagtaaggtgacccaggggaccgtccccaggtggggagcaaaagaaagaaaatagtagccattttcacagcgttttgtatagtagttattgatttaggaaaacaaacacaaaattctgaatcaaattacctggaggatgattaccagagtctgggaagggtagtagggggctggaggggaggtgggaattgttaatgggttcaaaaaataataattagaaagaatgagggccgggcacggtggcttatgcctgtaatcccaatactttgggaggccgaggtgggcggatcacctgaggtcaggagttcgagaccagcctggccaacatggtgaaaccccgtctctactaaaaatacaaaagttagccaggcgtggtggcacatgcctgtaatcccagctactcagaggctgtggcaggagaattgcttgagcctaggaggcagagtttgcagtgagctgagattgagccagtgtactccagcctgggtaacagagcgagactccgtctgaaaaaaaaaagaatgaatgaacaagactactctctgatcacacaataggatgactgtagtcaataataaattgcacattttaaaataacttaattgtacattttaaaataaccgaaagagtgtaattggattgtttgtaacacaaagggtaaatacttgaggggatggatacctcattccctgytttgtgattatttcacattgcatgcctgtatcaacacatctcatgtagcccaaaaatatatacaagcattatgtacccacaaaaatttttaaaaaggaaaaatttttttaattacttggaagcttctccccaaatatgttttttggttttttttaaattttattattattatattttaagttttagggtacatgtgcaggtttcttacatatgtatacgtgtgccatgttggtgtgctgcacccattarctcgtcatttagcattaggtatatctcctaatgctatccctccctccaccccccaccccacaacagtccctggtgtgtgatgttccgcttcctgtgtccatgtgttctcattgttcaattcccacctatgagtgagaacatgaggtgtttggttttttgtccttgcaatagtttgctgagaatgatggtttccagtttcatccgtgtccctacaaagacatgaactcatcatcctcccttattttgttcttttcaccacaacaaacttagaatgtgagaacataaagctataagaactatgattattgaaaagctagaattcttataaagtactgataatttgagaaaagggctcttgtgttaccaggctctgctatttttttcattctctgaataatgagcacccatttagccgaatcacraatgtgaaggaagagccgtaatttccaattcctccctgcccactctctcctcaggccacaaactgaaatcatccctcataggtgtagatttaaaaattggtgttctgcagatttcttttgtctgtaattccttcttctctctccatctgagcacattcttgcttgcatctaaactaagmttctcccatcaccaccgaagtccattgtcttagcaagagcaatcatckccttctcagtcatatctcccatgtttgaaaccagtgtgtctctacccacccacctgaatgtggcctcatcaggtatctagagaaggtccaaccttgtaaaataaccatagtgatgaggaccccagcccacctcccaaagagctccagagggaggaaggaaattatttttctagggcaagtcacaatacttggccctttttatacactgccttaaatctcacaaacccctgtgagaagacaggtattaytgtacccattttacaggtgacaaaggtgaaaggatacagaatttgcccaagattacataaattgcaaatgacggaactcagttttttcagtcaaactcaattttttctggattgcaaaatctatgcttgttcccctatgagactttgcctctttaagaaagagatggatggtaacatataataatatcacaccctgcctctcaaattgaaaaggggcctgaagtaccttttatggaggcctcaggaactggtgtcagtgcttataccagcacaaatgcacacatatacagacagagcaaaagaaagagagactggcctttctctccttaggggcaccatggcagggagcactcagtgttctttgactataagaaacggaaaagccactctagttaatttaaggattagtttatttgagagaacactaagtaactcatagaatcaaggaccacaagaaggtcaggaacatcaggtcagtaccagggatctccgattcattctttctgagaactgccatcaaattgacttgtcttcattcaccttccattcatatttcactccacytataattcagattcctgggagactgagtctggccaacctgtaaggtcatgaacctacccaggaacagggtaccaggattggtgccccccagggccatatggaaatgcagtaggcacagttatycaaaggaaaggaagggtgctgttaccaagggaagagggataaataaatatatgctgggcaagataacaacagatgcctgtacccacactctaccctttgctctagtaagtaagcctagtgattagggaagctagctagcctttggtcctaggsttaagtgacaactaaggagtgatatttttcaaaagatatagaaccaaaatttgtattttttcaggccctatttttgtcaaatgacttaccatcatcaattgtcctcaagtcctcccgttgtccccgctagatatcattgatgggttcagttaatgcatatttggaattgtaaccttacactgcctattaaacatctatgcccttgctgtggtcatgacccagccaagaaatggccaattataggctcctttttccttctgaccatgcctgaagtccagccgttgatccagccccttaatcaatgataagaatgatgctcaaaccattcagtgcatgtgtaagatcatcttgagtagcagctcccaatccttccacatctctaaagtaggaaaatacttctttgggaagttacccgattgaagaagtgaagtcttcatggtcctggtgaaaacctcacctccaatttactgtttggctgagtttctgtgatggccttctgctctagaaccagagatagcttcccagcaggggcaagaaaagaggatctgtggaggacacaacagataatcagacagtgggaacaccaagtcacagagttcttgcagctgtgtgtcctgtgcagacaaagmcactcaccctcctcctgcctttatggaaggaaggtcgtaggcaatgttactttgtttttggcaaacccccaaaagaagaaaccactccacatagtctgagaggtagtatagtaagtgttgtgcgtagagacctcattaatggccaacacctgttttatttgcaactcacwatctttctagttaagaagagttcagagcctgacctgcacactatattgggagataaaacaatgagatgctcattctcaatgtgcctggctttatggagtagcttcattcctacaagtgtattctgtagatcaatatcaatccccggtgcctattgactttacagcacagttcyagtattgctttatctttacagagcaaatttttattatcagaggcttctaatcctttagctttaaatgtctctattcctgcacttcagcttttctgaaatttttccaaagaaaaacattttatgagaaaaagctaaattactaagtatattcatgtgctatttctcctaatcctcacaaaagccctgtcatgttgtgatttttccctattttaaagattggacaactgaggtacaaggcatcattactaatgaaaaactacacaagggctcaacccatgtcttctgatgggactgaacctcaagtagcaagttattgcttcatcttcagtgggtgtttgtgaaatgcgtagaaagggcatggaagctgcatcatattcagtggacactgcaagtgatctgtttgctattcacttaacacacatttgttgatgacccattatgttcagaggtgaacaagatagtgtctggagcctggggtagctctcactttagaataggcttgtttatcaaagacaacttttgtcttgcctaagatcactcaacaatctctatgaggcagaagttccttggtccagtcatgtagacctcctgcccagatcccatcggtagccgctgcccctctcccccagcagctgtgactttgtctgattacacctcacagccaccgcttttcctgggggactgccctctgctaactgctcaacaggctaccacattcccacctcacccccagcagaagcccacggcccatgactaatagatacatgccaaggggcatcagaggctgatcttcttgtctcaggtggaactaattttgttgtgagattcatactccagcgccctcctatgggctcagactgaaacaatctgcaggcaaatcaaaagctttgcttagatatttgtttcagctctgtcccgctttcctccttccccttttctggggaccatatcctcaggaaaacacttgaactagactctccatcgcaggctgtgtctaaaggaacccaacagaagacatctagtttgactttattttgcagcagaagagttacaaatttttagtgtctgaaaaaaaatctgtgtttcatgttttcactcattcagattgggccttctcctaaaattaaacaaaaccagcaagattttgctttgcaggaaagatctgtctttgcaggattttgtttgtactgagggtaaggaaacagtgatctcttaaaatattcaggactactaaaatacaacaggtgcattgccagtttcctaatagtatatctygaaaccagaacaacacacccgctgataggagtcatgagtttttgcttttgagtagtgatatgaacctaagtgtgagttgcattgaaaattaatgcgctgcctgcctaatcattttcacagagcctttggtgaggttgatgttgagcttgttggataattatctgttttttaaaaatctaagcatccttttatacgtcgcgttttctgtttgcaagtttcgcttcaagtttactgaaccatttaattaacttaagtgtttaaacttctagaggtgttgattgattctaatcagcattttctgctactctaattgaaggcttcctctcttggactattgtcagtgaagcaaaaaaaaaaaaaaaaaaaaaagcaaaatgttgttcagtctttggcataatctaacacaaatttagttggtcccatgattgcatgaacttcarraggccagaagagagccaatttgtctatgtttttgaaatcgcggagccagccccaggaagagactgtgctgcaggcacagggaggactygcaacctctggtggggacttagactccaagccaaaccactttcaggtttggcagttttcactcttcctggaagctcagtcgggggatgttttgcagggacccttaccacccagaggaaatgattttctcctttaatcactcttcttttctcagaaaaacaaaaaattacccccaaactcccacctcctgtggtaacaccccaggcaaaggcaaacttagtccctagaataagagctgcccaatattaagtaggtctttctgctggtggtgagaagtcaggcttctgaactccaggtgttcagacaacctgggtgttgtgtttatctgccctttaaaattgctctggagagagcaagaggggagtccctgtcaaaacagctcagggagctcctccagcctgtaggcacctgagacatggcccctcagccactccccaacttcagcttttgaagaccaggttttctgctgccttcaaaaagattttctggcaagctgactttggtccctcctgagacaattctgttctagttgacttctgttcagcacaaaattatgtattatggatattgcatttttctgctaagaaaacgtcggctgctaaactagatcaaaccgccctccagttcttcagtgctgactcattttaattattgaacttttctccctggaaagtacactccgtgctgtttgtcgagaaactggcagttttaacacaatttggaaacttttcatagatggatcaccccaggaaaacaggcagctgatcaccagagaaattctgcagttcagattagtttgctgtgtgatgacactgaagaagtgaaatgtatggggtttctccctaccacccattccaactccctggctcctcacaagacaatgccactgcacgcagcaaggagctcttgttttctgtgtacttctgtgtactgtggggcccagctctagatctgtgacatgctcaccagctcacctaagcgaatataatccctgactccctccccaaatttgtttcttacctccatctaattcagtcatacctaccttctttctgcctggggaacactccaagccattccctacctkargacatttgcatatgctattctgtctagtaagttccacttctagtctaggttgctttgcaaccctggctgcacattagaataattttaagccttaccttgaggtcaattaaatttccacctctggaggtggggtccaccatctatttttaaaaactcccaggtgatatgaatgcacttcaaaggttgtgagtcatcactttaaatcttcatgtggctgggtcctcccattgttcaggtctcagcaccaagatcccttcccagagaagcattccctaatcatcttatctgaagtagcctgaactctaascccccagagctctctacatcactcactgattttattatctctacagtactcttcactctctgaagttatcttttctattttttatttattgtcttccccactgtaattcaagcttcaagagagggatttgttcatcttgttgacttctgtatcaggacatctgcccgatacatagtaagtgctcaaaatatatttgctagatgagcaagtaaatgaatagatggatatatgaatgaatagatgaatgaatgagtttctgccctcagaatctgtattagtcagggttctctgaagggacagaactaataggataggtgtatatatgaaggagagtttattaaggagtactgactcacacaatcacaaggtgaagtcccacartagaccgtctgcaacctgaggagcagggaagccagtcccagtccccaaatctcagaagttgggaagatgacagagtgcagctttcagtctgtggctgaaggcccaagggcccctggcaaaccactggtataggtccaagagtccaaaagctgaagaacttggagtctgccgttcaagggcaggaagcatctagcccaggagaaggatgaggatcggaagactcagcaagtctagtccttccacgttcttctgcctgctttattctacctgcactggcagctgattagatggagcccactcatattgagggtgggtctccttctcccactggctcaaatgttaatctcctttggcaacaccctcacagccatgcccaggaaaaatactttgcatccttccatgcaatcaagttgacactcaacattaaccatcacagagtccaagttggtatttttgatagtatacgtcactggataagagctkccactcagcacacctggggaaaagtatactttctctacagacattattttctactttgagttcctcaacatgaggatgcaaaaagttttaataaacaacaacaaatttatttaactacaacctatcacaagttgcatattgatattgaaaattctgtgaaagtctaagtgttcagtgcctctccttccctgtgtcccatcagcatggccatcagagcagcaagccaatgctttgccatccagcacctgtgccctacccacccagtgccaagccacagtggaggcatgagagctcttttctttccctctctattcgctctgcctcctttcgaagctcctgagagaagcatttaaataatacactggtcttcaataatagaatctgattggaaggactgctggagcccacttgtaatcactgaagcagcaaggacagatcacgtctttcatgattttcttccacttttagtgccatcttccactcacttctacttccagatccttcctaggttggtgtcctgctttaagtgtctccatgagtgtcttatccactccagtgtcttcatcatgaattgccagcagctcatcctttgaccaacatgtgtcccaacttggagaagcccgatgagttctgggaaatcaccaccaccatgtttctcttactcagagctgcctccagtttttctataaaacccaaaccactattctccaaaacagaaaaatggtagagcttcaaatgtggtcatgaggtcttccagaagggattccattttcttgattaaggataggaacatgagaaacacacacacacacacacacacacacacacacacacatattcatccactttccttccctgcacacctgctcaacaggcacaatgcctgtgttaattcattcatatayaataaatttatcttctttcctcccctggtaagtggatgaataatggcagactctgccatttcctaccattttggctattaatgcacatcagcaagtgtgtttcagcttcagggaaccgagagatatttctggyaacctgtgagagctaattcaccttcaggaggtgagtarccaaatatttataccttatcrgattctgactcattctccacctttaaaagtatgtgtcacagtgcctaaagcttaggctgggtatcagggacatctaaggtgccagactgactctgcagtccagaggattcagaaatttgattttagcagaatctctataaaaagaatgctcggggagcctggcccacactaaccttataagccaggacagtttctgagcatacacataaggcttcaccccaagaagtgggctgaccattcattcacatgataaatatttattaagcacctagcacattgcttctatgagaatctaggcaccgaggaacaacagggaacaaaaaaagaacaaaaactcttttgtaatggaacttagtgggagagacagataatagacaaatatgtaaaatatataaggatcaaatagtgacaagcgctgtgggtaaaataaagtaggggatgagttataggaaaaggcgtccagtgtggggtggggattgcagtgttaaataaggcagtcagggaaggcctcagctagaatgtgacatatgaacaaagacctaaaggagatggaaaggccagcttgcaagtttctaggtagagaggtttccggccctcaggcaggagtgtgcctggtgtgtggcaagaccactgtagctggaacctatgtgttaggagagagtgcataggatcaaaaaagttggctaatgtggaatcctgaaggttttgggggactggatctggatatggattttcttctaagtgtgatggggccatcagacatcttcaagcaggggagtggtatgatctgatttagcttttagcaggttttttctggctgttagccaagagaagaccatagggggcaaaggccccggcaggcaggcctattaggaggccactacagtcctctgggaaagagatgctgatagcttgaaccagggcagtggcagcaaaaggagagagaagcaactggattctgcatgcattttgaaaggagagccaacacaaattactgctagasttggtaygctatggagaaaaagagaggagtcaaggtttagagccacagaaatgtacagtttccatgagagctcatttctggcaaatggctttactcaggaatcaaatgcagaccagatggacagttaggtgagcagagaattatgacaaagtaattcatctcactgacaacagctttcacttaagagcactgagtgtaggccaggccttgtgttaagcatgagcttacatcctccgtttcttcttccaacagcccaatggtaaacataccattatccccataaataaggaaattgaggctcagagcaaagtgatttgcccagcactgcgcagctactcggtgctggaactatgacttcaaccagacctgtctgacattccctcaaccactgcgctacacagattcctactcaaaatgctttttaaccacactcaggaacaattatggattgttctttttcctctagggctttttcaactacttaaccaatattctagactgaaaaaaactacccctaccttgcacagtggcagagacccctggtcaaattctgtctctctggccttttgttttttccatctctacctgtcacctctaccctccgtcagcagctcagcagtggcttcacagctattgttgcatccattttggttcaaaagggtcctcccccttaaggtttgagagacactgtgggctacctgatggggtttagagagcaccttgctcttatgagcagtgagtttacaacatatgggtggatttcttttgaggcattttttttttcaagtgaattaccccaataaggatgctatttcctgtcctcatctccgggtatgaggaatttatatttgtcagcctagggcactcaccatattctccatgtttgttcagacgaatgcttgctgggggccctgtatgtgccaagcactgttttagggagtgcagtagtgagcaaactagacccagttccttctcccaagagggtggtaagctggtggggcagccagatgttaaactaaggatcccctctgctatggttcagggttggggtttgtgctctaaaaggaagaaacattgatctatgtgtatatatagaagccaggcctcacctgggaggtgagagaaagtgtccctgaagaaatggtgagtaggctgctatctgaaggatgagcagttctcccaggatagaagatggggaaaggtacaagtggkccacacggaagccttgtaataagagggaacatagcaagtttaaggagcaaagatagcaagtcaaggcttaatacaaaatgagctggagaactgggaagagctgcgaagaccttccttaagaatgttgatctttagccgaagaggaatagaatccaccactgcagggatgaatgaaaaaaaagatgtgatagattttcttttcttttttctttttcttttttttttttttagacagagtcgctctgtcacccaggctggagtggaatggcgtgatcctggctcactgcaacctccacctccacctcccagcttcaagcgattctcctgcctcagcctccctgatagctgggattacaggtgcatgccatcacacccggctaatttttgtatttttagcagagatggggttttgccatgttggccaggctggtcttgaactcctgaccttaggtgatccaccactgtcgcctcccaaagtgctgggattacaggcgtgagccatcacacccagctgtgatagattttcttttgaaaagatgactctgcctacactgtagaagatagagtggatgggcaaggtggacagaggagaccactgactagattattgcactgtctgcactcacatgatgatctcatcttgccctgaatttgcctggacagagaatcttagcatatctgaccatgaagagatcttagagagcattccttgagttcagctacattattttayggatgaaaaatgtggcctagagagaaacacttgcccaagaccacagggccacttaaattacaaagtcaactctcaaaccaaggtcttttgacttaacgccttgtgcttgkaaccattgtttcaattgtgtgcttttacatgaagcctgggctctttcaaagtattggttatgtcatatttagtatagaatctccagtgtttggtgggagtagcaactcagtatatgttggatggataaataaatggccggaagaataggtggatagatggatggatgaatgaatgaatgatagatgcatgcatgcattgatggatggatgaatggatggacggatagatgggttagtacatggatggatggatttgaaaggatactgttttataatccacaagcttccatagaaacaatcgaaagagatcagttttcctttagtgaaaaccatacttcataacctttctcgagtcatggcaacctctcttgggccacagcatcaatgtgaccccataggacatccttccttatccaagtctgtgcctggaaacctcagtccctgaaagaaggtgataaacttactgcagttgtttggaatggcaagcagcccgggaccggttaggtcatgcactgactccttatttttcctggaaaggagcctagcttgctaactttccaaattgaattttaaaaactttaattaggtcaccacaaaggtttgtctcttttaatggcagaaagcccagtttcctaagtgtttcctcaggagcccatcctttgccacctcacgactcttgtacatcgcacacctcattaagggaggaccctgaatggaatgctgatgaaatattacttgagtgtcaacagtatggaggtgctcagaaaatggctcagagactattgccaaaatacacccttgacacacatcctctcattttattctcaaaacaatatggatgggtggggtggggagagaataaggycttatctcaattttgtaaacaaagagaatgagaccatagagtctaaggggctggcccaccccagggccaatacacagactcagatctgctagggacactcccagtttggaatatcattatctttccatggaaagatattatcatggaaagataatgatattccaaatgtgctgacttccttgttggagttatttagaacataatcactataactaatgaacaaagaaaacatgtttgtcatcagccaacatttattgattacctattatgtacagtacattttaccagaggcttatctcaggccaattggacattcctctttgccctccgagcatgaaactagggacctcattcaagtccccagtcagccactttctccacaatacgacctagagaaagacacttaacctccctgagcttcagtctccttctctgctaaacgggcacagtgatttgtatataacaacctcccagcaggatacatacagaacactcaaaattgaattatttgaggagaatgtattacaaaaagaccattcccaaagtcctgggtaagggagccaccagagataatgcactaacccagagatagaaagaacctggctgctactactccaaggtctaaagagacaaaaggaaggagaggttataggaactggaagaggagagattcttgtagatttggcatccctgagagaaccagggaccctctggacacagccagcctgagacaatttcacagagcaggaaccagagtagaagggacctgatctccctgtctacctccctctggtttccttccagggtggccatggcagaaacctttgatagccagaggtatgggagtcagtgagtgccatgcacacagtgggtctccccaggcagagaaaggcggagagggagtctggggtccaggtggaagccaccatcacacagcacctcctctgccttcatgaaagtgatttataaaggtaaagattctctgtaaaagagaaaatgtcaactagtatacaaaattttctacaagcctgagaataagaatgacctgtcaccagccttctattggctatcttgtgtgccaccaaggatgagagtgattgaaaagcagaggcccagtagttcaaggcaaggtcatataaagggctccagatccaggcaatgctggatctgaatctgggtctaccgccagctagctgagtagtcacagcaagtctcccaactgctctgggcctctgtgctctcatctggaatgcagagaccataatatctatcttgcacagtgctgtgaggttcaaagggaatagaataggaaactcacaatgcctggcacataataggtgctcaagaaatatattgtaaagtgaacaaatgaatgatttttaggatcccttctgactcaagaaatatattgtaaagtgaacaaatgaatgatttttaggatcccttctgactctcacatggtaggggtctgattctgtagtctggttggcaggttctgagaagcatttgtgacatctgggtaaggtgccaacctgaggacaagacccagggcaggatggggtggccggaggtacacatggtgactacaaggtccacagaaagaggttctgagtggagacaatgtgtctcagaactctgtctctagtcgtaaaaccttttgtagaactgtggcagcctctaggtaaatggaatgtgaatgcaagctagaaagtttgatagaatgtctaatttgtcaaaataggatttttctggcaatacattacaaatgactgtgaaattgytttcttggcctgttaccaaacatgggtgaataattgagagttaactattatgagactttcatttggggatataaataatatttaaaaggattaagaacttgagggaaggaagctgacatttgtgagtatcatgggatcctaccagctcatatattaaaggccccaatcttcgcagaatttattgagcagaggtaaacaaacaagaaacataaaaaaaataaataaataaatgagagtgttatgggttgaactgagtctccaaaaagctatgttgcagtcctaacccccagaacctctgaacgtgaccttatttggagccagggtctttgcagatgtacttaatcaagttaagactaagtcatactgaattaaggtgggccctgatccaacaactggtgtccttatgagaagagggaaattgggacacagacagaagacaaccatgtgaaaacagaggcagaggccggagtgatggtgccgcccgccgaggaacaccaaggattgccagcaaccacaagaacctgggagagagcatagcacagatccccttcccagcctccagaaggaaccaaccctgccagcaccttgatatcagacttttgaaaaaaaaattgtttttttaaattttaagttctgggatacatgtgcagggcatacagggttgtttcataggtatacgtgtgccatggtgatttgctgcacctatccatccatcacctaggtattaagccccacatgtattagctattaatcctgatgctctccctccctgctccctccactcctacccccataggccccggggtgtgtggtttccctccctgtgtccatgtgttctcattgttcagctcccacttatgagtgagaacatacagtgtttggttttctgttcctgtgttagtttgctaaggataatggcttccagctccatctatgtccctcagtttgtggtgttccgacagcccaggaacgtgaccacttacggaatgttaggcgacggtaagtgctgtcgtgaaaagcaatccagagaacaggtgagaaggattaggaaggagaggttaggcaggcaagggaagcatacagtcattgggacaggcttcacggagacgtgaaggtgagacgagcagatggaaggccatgagggggtgagccaagcacaggtggggaacaatgtggcagcagaggaagcaggtgccgtggaggcccatggaactgtgccatgttcaaggagcaccaaggaggccaatgtggccagagcatgagcaaacggaggtgggagaaggggccagagaagatgtcggacaaaacccaggggtcttgtcagccattgccaggattctgctcttgctctgagtggggtggagagctttgggagggtctgtgagcagtgcagcgatattatctgaagtatgacttaaaacatcccctctggctgctgcactgaggacagatggaagcaagacaaagacagcagtgagacctgttaggcggccactgcagcaacccggctaagactacttcactgaccgggacattcaccagttctccaaggaygctctcctatttcaaaggcagagctgggattcccagtctagttctctctgcagcatcgtgcagcctaccacctgatggccacaaccatggtgcaaacttattctaasatcttgaaaggaaggaaggaaagtactttgcatgccttctcccttcatctctgatgtctaccccatggggatgttgcaagaatcaaataaaggaacagctgtggaaacatttttgaaaaagcatgaagcactaaatgcaagagatcataattaatactaatagcagtcacctctctctctttatcctacaactgtctgcttataaataccaccaaaacaatgtctcataaagagattgatacccacatggggatgaagctggtatacacatctgctggggagaatttttcattgaatagatttcattgtaacaagatcagcaatgccccgttaccatgggccatctgtcgggacatgcaagtagacttgtcatgcagaactggactgtcaaagggaacagcagtctaccaacatgcaataaagcaatagattttttctgtatttttaaaaatgatgactgttttttcttatgctctcgagggatgtcttcgctgaagctaarcaaaaactgaacatgagggaccagtagccacctgctggcagacaagcatttgcaggaattagtaggcctgggggctgtgtgtgtctccggttgcaasaaggggaggaggttagttcaaagaaagctagaaagcactatggagactcctcaaaccaccttactatccagcaaccccacttytgggtatatacccaaaggaaataattttttttttttttttgagatggagtttcgctcttgtcacccaggctggcatgcaatggcatgatctcggctcactgcaaggtccacctcctgggttcaagcgattctcctgcctcagcctcccaagtagctgggattacaagtgcccgccaccatacmtgggtaatttttttgtatttttagtagagacggggtttcaccatgttgcccaggctggtctcaaacacctgacctcaggtgatccacccaccttggcctcccaaagtgctgggattacaggcgtgagtcaccacactcggcccaggaaataaaatttttatcctgaacagatattggcactctcgtgttcactgcagccttattcataataaccaatatatagaaacaacataatgttcatgaacagatgaatgggtaatgaaaatggaatatcatccagccttaaaaacaaaggaaatcctgccatttgcaacatggatgaacctggaagacattaggctaagtgatataagccaggcacagaaaagcaaatactatgtgatgtcttatatatggaatctaaaatagtcaagctcacagaagcagagagtaggtggtggttaccaggggttggaaggagaggcaaatgaggagatctgggcaaagggtacagtatcagtatacaaaattaataaattctggagatttaatgcactataagtgacaacagttaacaataccgtattgtgtatttgaaatttgtatgagggtagatcttaagtgttcctatcaaagaaaaaagagaaaaggtaactatgtgaggtgatggatatgttaattaatttgactgattatttcacaatgtctacaaatattaaaaagtmattctgtataccttaaatatatacaattgccttctatcaattatacctcagtaaagcaggaagaaaaacagaagggagacaagaacattaagggcacgatggcatctctttgtcagatactggtcctaagtgaaaactgaagaagacttgtttcgtccagtgaccttgaaaggcttggagcacacgctgcttcacttcagggtccagatgagccagccagacggaaggtgagggagcagagcattttctgagtttctagggagaacatagcgacagcaatcagaaaggatgggaagcagcaacagtagcagcagcagcatctgctgtgtctggcaaggtgatgaggaagcagcaggacccagcagggaggcaggaaagcagcatcccacagagggcagcagctgctggacagagaggggccacccccataggacttcaagtacatgatgccaccacaagtccagagctaaagaacaaaatcagatggccacctgggccccaattataaatgactggaggagacatcagggtagtagtcaaaaaggagggtgacacctgcagatgtgcaggtttggcaagtagtgaaattgggcattaaaattattcacagttccaggatgaagtatcctggggaaatccaggtaacaacaataatagctacattccttagatgtgtacaatatgccaggcactgtactgagtgatttcattcatgcattcatttgtttattcattcagtgaatatttatggggtgccttctatgtgccaggctgtgttctagttgctggggataaaccagtgtaaaacacgaagaccctggccctcatatggcttacattctagcagttggagatagatactaattaataaatacaacgtctcatctacaaggagatgttaactgctatggaaagaagagaaagcaaagcaaagggtcttgagagtggcaggaggaggatacagaactaatcagaagagtcaggacaagcctcatggaggaggggacatgagagccaagacttgatgtggtgagccatttggggatctgagaagaaaatgtttgagcaaagggaagagctggtacaaaggccctgaggcaggcacttgcccagtgaatttgaggaatgactaagaaactaaggtagctggaaagaaatgtgctgtagggggagtatcttaggctataagctcagagatgaatgggaagcccaagtcaggtagagctttatgtttaatcctcaccatgaagctaaaatacatgttactgttcccattttactgataggaaggcaaaggtacagagagtttaagtaatttgcccacatggagatagtacataggtgatggtactagtacagttcagctctaacacggtgctttttttttttttcattacrttgcattattacctcttaagaggcccctgggagatacctacctgtgtacataaattaaaatcaaagtcctgtggtttactgatttcccaaagccaaaacacatagacacagatgtatatacatatcaatctatgggatgtctcttcactctattgttttctttgctgtgcagaagaatacagttgcatcaaactcgttttagtttgatgcaactatatgtttgttttttgctgcctatgcttttgtggttctatccaagaggtccaacaattcattgaaataaataaacacagagacagaacatgccaaaatctgtgggatacagcaaaagttatgttaaggggacagtttatagtgctaaacaccagcctcaaaaacatagaaagatctcagattaacaatctaacatcacacctagaggaactagaaaaacaagaacgaactaacctcaaagctagcaaaagagaagaaataactaaaattgagcagaactgaatgaaattggcaacccaaaaatccatacaaagaatcaaaaaatctagaaggtggctttttgaaaagataaaaatcaatagaccactagctagattaccaaaggaaaagagagaagatccaagtaagcacaatcagaaactgcgaaggtaacattacaacaatcccacagaaatacataaatttctgaaaacacgcaacctcccaagattaaacggaaaccctgaacagaccaatattaagttccaaaattgaatcagtaatttaaaacctataaccaaaaaaaggccaaatcaggtggattcacagccaaattctaccatataaacaaaggatagctggtaccaactctattgaaactattccaaaaaatcaaggaggcgggactcctccctaactctttctacaaagccagcatcaccctgacaccaaaccctggcaaagatacaacaacaaaaaagaaaactaaaggtcaatatccctgatgaacatagatgtaaaaatctgcaacgaaatactagcaaaccaaatccagcagcacattaaaaagttaattcaccatgatcaaataggcttccttcctgggatgcaaggttggttcaatatatatgaatcaatagatgtgattcaccacataaacagaattaaaaacaaaaaccatatgatcatctcaatagatatagaaaaagattttaataaaatccaacatccctaagtgataaaaaccctcaagaaacaagacatcaaagaaacatacctcaaaataataggagccatctatgacaaaaccacagccaacattatactgaataggcaaaagctggaagcattccctttgacaactggaaaaagtgaaggatgctcattctcactacttctattcaacacagtactggaagtccttgccagagcaatctggcaagaaaaagaaataaaaggcatccaaataggaaaagaaggagtcaaactatctctctttgctgatgatatgatacctagaaaaccctaaggactctgtcaaaaagctcctggcactgataaatgacttcagtgaggtttcaggatacaaaatcaatgtacaaaaatatagcatttctatacaccgataacattcaagctgagagtcaaatcaagaacacaatccctcttacaatagccacacacaaacacccacatatatagtaatacatctaaccaaagaggagaaagatctctacaaggagaattacaaaaacaaaaacaaaacaaaacaaaaaactgtgaaagaaatcatacaggaaacaaatggaaaaatattccatgctcatggattggaagaatcaatattgttaaaatggccatactgcccaaagcaatctgtagattcaatgctattcttatcaagctaccatcatttttcacaaaaatagaaaaaactattctaaaattcatatggaaccaaaaaagaacatgagtagccaaagcaatcctaagcaaaaagaacaaagctggaggaatcatattacccaacttcaaactatgctataaggccacagtaaccaaaacagtatggtactggtacaaaaacagacacatagaacaatgggacagaatagagaacttagaaataagccatacacccatggctaactgatatgcaacaaagtgggaataaataagcaatgagaaaaggacttcctattcaataaatggtgctggaaaagccagctagccatatgcggaagaatgaaactggacccctacctttcacctatacaaaagtcaactcactcaagatatattaatgatgtaaatgtaagacctcaaactgcaagaatcccagaagaaaacctaggaaacaccattctggatgttagccttgggatatagtttatgaataagtcctcaaaagcaattgcaacaaaaacaaaaattgacaagtgggaccgaattaaactaaagatcttctacacagcaaaagaagctatcaacagagtaaacagaccacccacagaattagagaaaatattcacaaactatgcatccaacaaagctctgatatccagaacctacaagaaattttaacaaccgaagaagcaaaaaaaaaaaaaaaccccattaaaaagtgtgcaaaagacatgaacagccacttctcaaaagaaaatatacaagtgaacaacaacaacaaaatgttccacatcactaatcatcagaggaatgcaaatcaaaaccacaaagagataccatctcacacaagtcagaatggctattattaaaaagtcaaaaaacaacagatactggcaagctgtggagaaaaaggaaacacttatacattattggtgggaatgtaaattagttctgccacttggaaagcaatttggagatttcttttttttttttttccgagayggagtttcgctcttgttgcccaggctggagtgcaatggcatgatctcrgctcactgcaacctctgcctcccgggttcaagcgattctcctgcctcagcctcccaagtagccaggattgcaggcatgcaccaccacgcctagctaattttgtattttcagtagagacaggatttctccatgttggtcaggctggtctcgaactctcaacctcaggtgatccactcmcctyagtctcccaaagtgctggaattacaggtgtgagccactgtgtccagccgggggtgaatttcttaaagaacttagaacagaactaccattcaacctcacaatcccattatggggtatatatccaaaagaaaataaattgttctaccaaaaagacacatgcactcctctattcatcacattagtatttacaataacaaagacgtggatcaacctaggggccccccattagcagtgaatcaaataaagaaaatatggtacatatacaccatgaaatgctacacagaaataaaaaaagaatgaaatcatgatttttgcaggaatatggatgcagctggaggccattatcctaagcaaattaatgtagaaacagaaaaccaaatactgcatgttctcacttataaataggaggtaaacattgggtactcatggacataaagatgacaaacacaaacactggggactgctagatggtcgggggtggatagggggtgaaaagctgaaaaactattgggtgctatgctcagtaccttggtgatgggaacaatcataccccaaactcagcatcatgcaatatacccaggtaacctgcacatataaccccaagtcaaaaatgttaaaattatttttttttaaagagaaaaagatataattacccagaggagtctaaactgttctaaaccagccaaaaccagctaaaactggctaccactgctttaaaccagttgaagccagctgaaactagtcaaaacagatggctgaagccaactgaaactggtcaaagctgaatgaaaccagtcaacattggctgaagctggctaaaaccagtcaaaaccagctggaaccagttgagccctgctgaaactagtccaaattggctgwaactagtmcaaattggctrtaactagtaaaaatctgttataacccatggaaattcgcagaagctagttgaaaccagtcaaaaccaaatgaaactggctgaaactggctgaaaccaactgactaagacctgttgaaaccggccaacaccagccaagaccattcaaaaccagtggaaacaagttgaagctggtcgtggacagccaaaaccagtgatggctgctcaaaaccagtcaaagccagtcacggccagttgaaactggtcaattcataataacactccttggtgttcatttaaattaataaaaaacttatttccacatgaaaacctgcatacaaatatttataggagctttattcataattgtgaaaacttagaaacaccaacatgcccttcaataggccaataattaatggattaaccatggtgcatctacacaatgaaatactattcattgataaacagaaatgagagctggaacaagacaaggatgttcactttcactgcatttatgcaacatagtactggagtggtcatgagcaattaagcaagagaaagaaagaaaatgrttatccaagttggaaaggaagaaatcaaattatccttgtctgcaaatgarataatcttaggttttaaaaaaacctatcattcccatggtaaawggtaaatagatagatagatagatagatagatagatagatagatagatagatagatagataggatggataggtagrtaggtaggtagatagaaaacaaactgtagcattactatatgttaacagtgatcaatctgaaaaaggaatcaagaaatcaatcccatttacaatagctaccaaaaaaaaaaaaaaaaccctaagaataaattaaccaaagaagtaaaagctatctacaaggaaacctataaaacactaagaaaagaaattgaagaggaacaaaaaactgtagtgagatatcccatgctcatgagctggaagaattaatattgttaaaacatctgwactacccagaatggtctactgattcaagcaatccctatcaaaataccaatgacattgttcatagaaatagaaaaaattcctaaaattcatatggaatcacaatacatctcaattagctaaagcacttttagatcaagttttaagagccatgttttaagtatcccatgggttgggatttttttctcagcaacatctgaaagtgactcaggccaatatgatagcaagggtgacaaaggtgtcaagaacacacactggggaaaggacagtctcttcaataaatggtgttgggaaaactggatagtcacatgtaaaagaatgaaattagacccttaactcacaccatgcaccacaatagccaactaaaagtggattaaagacttaaatgtaagacctgaaactatgaaactactagaagaaaacataaggcaacattggtctatgacattagtttaggcaatgattttttttatatatgaacacaaaagcacaagcaacaaaagcaaatgggactacatcaaactgaaaaccttttatgcagccaaggaaattatcaacagagtgtagagacaacctacagaaggaaagtattaatatttgtaaagcatacacctgataagaagttgatatccaaaatgtataggagctcaagcaactcaatagtagtaaaaacacctgatttaaaaatgggcaaaggattggaacagacagttctcaaaatgacataccratgaccaataggtatatgaaaaaatgttcaacatccctaatcatcaaatgcaaatgaaaatcacagtgagatattacctcacaacttagaatatctattatcaaaaagatgaaacataacaagtgttggagaatatgtgcaaaggatgtgaagaaaagggaaccctgaaacactgttgatgggaatgcaaattagcacagccattacggaaacagtatgaagattcttcaaaaaagtaaaaccaccatatgatccaggaatccctgtactgtatatatgcccaaaggatatggaatcagtatattgaaatgatatctgcatcccatatttgttgcagcattatttctaatagctaagatatgaaattaacctaagtgtccatcagtggagcaatggtaaagaaaatgtagtggatatacacaatggaatactactcagccttaaaaaaaaaggaaggaaattctgtcatttgagacaacctagatgaatctggaagacatgctaagtgaaataagccaggcacaaataccacaagatctcacttacatgttgtattagtccattttcatactgctatgaagaaatacccaagactgggtaatttataaagaaaaagaggtttaatagactcacagttccatatggctgggaaggcctcacaatcatggtagaaggtgaaagagaagcaaaggcatgtcttacatggcagcaggcaagagagcatgtgcaggggaactgccctttgtaaaaccatcagatctcatgagacttattcactatcacaagaacagcatgggaatacccatccccatgattcgattacctcccaccaggcctctcccatgacacatggggaataggggagcgataattcaagatgagatttgggtggggacatagccaaaccatatcacacatggaatcttaaaaagttaaactcatagaagtgaagagaagaatgttggctaccagaggctggaggaaggttgggggattagagagatgtcagtcaaaatatacaaaattgtagttagaataatttcaatagccctactgtacatgatgactatagttaatagcaatgtattgtggtattaaaaattgctaagagaggggccgaggcatggtggctcacgcctgtaatcccagcactttgggaggccaaggcaggcggatcacctgaggtcaggagttcaagatcagcctggccaacatggtaaaaccccatgtctactaaaaatacaaaaattagctgggtgtgttggtgtgttcctgtaatcccagctacttgggagactgaggcaggagaatcacttgaacctgggaggtggtggttgcagtgagccaagatcatgccactgcactccagcctggctgaaagagtgagactccatctcaaaaaaaaaaaaatcggtaagagtagattttaagtgttctcaccacaaacaagtatacaaagtaatgcatatgttaattagccagatttagtcaatccacaatgtatacatatttcaaaacattatcacattgcayacaataaacatattgaattttcatttgtcagttaaaaatataaataaattttaaaatgctaaaggaaggaagaaagggagggaaaaaagagaaagaaaaggcatgttgcctgcaccacagggcacatggaggctggggacagctcaaattgtaaaggatgtcagtctctatactggaaattgtcactggcaatcagcaggccacataaaatagaaagctgtccagcacaaaatcaatgttcttccttctgtggcatcatttccttatatctcaataaccccattattatttcaaattatatttatctcaaagtagaaataagtacacacggatcattcactttctcctttgccaatttatgacaaatgatattccatcacatattcatgtaatcattcattcattcaaaatcattgggcrtgtttgatgccatgaaaaaagaatggcccttggaatcaaatggccctgggctggaatcctgactgctatgccacctctaggagctttacatgaagttatttagcctcgctaagccttaggattctcatttgtaaatggccatttttaaaatctctgctttgtaaagttctcagcatagtattttatatagcagataataattgctgttatttttattacaagcttcccatattccaaaaactctagtgggtactagggaggccaacataagtgagccaaggtctctgtccatagggtgctccctttctctgagggatgatatggttgagagcaccacattgggagctgaaacgcccaggttttaatcttggctctactgcgtgcttaaatctgtgcctccgttaccccttatataaaatagagataaaaatagaacttgcctcttagggttattgtaacaattacatgagtcaatatatacaagtgttaggacaacacctggcctgtaataacagccaaataagtgcttggtaggattgtatatggtagaagagatggacatgtcagtaactaattgtaatacacatgataagtgctataatagagaaaagaatacagggacaaagaggaaaggatcagctcttctaaggtcaagaagggcatcaaagagtataaatacttgtactaggtctggaataaagtgtaattctgcaggcagatggggaaagggatacaattcaggcatagaagatggtactgcaaatcatttaggcatgaaatagtccataataatataaaacaagaataatgataaaaataacattcaataatattagttccaaacacagacatcatctcacttaatcctcacagcaacctaagaagtagggatgaatactatttctatgttatagacaagaaagctaaagcttagagatgtttagtggttaaactagccagtcgtgcaaaccgtaattcaaaaaagattacagcaatgcaggtctccagatttttggaatgttattaatcaatgtattagttatccattgctgcataattcattatcccaaaatgtaatgacttaaaaaacattacctcacwgtttcaggaatctgggagtggcttagctgggtagttctggctaggggtcttccgagaggttgtagtctgatgtcacccaaggcagaagtcatctgaaggcttgactggggtagaagattcacttccaaggtggcttactcatatgggtggtgaatcagtgctggctgatggctggaggcctcagttcctcaccacacacatttcccatagggctgcttgagtgttcacatgacattgcagccatctccccccaaagcaggtgatccaagggagcataagaaggaagctgtggtgttttatgatgtggccctggaagtcgcacactgtcatttacttaatatcctgttggtttcacagttcaactctacgcaacatgagagggaaccacacaggagcatgaatatcaggtggcaagaatcattaaggagtattcttgaaggctggataccacaattataacttttttagaaaactagaaactttattgggttatcacagtttttattttgttgaggaagttaaaataaactcccaaataacttgtcatatattatcaatagcattttataagagcaaggacattttaatatcaaaaaagcaataagtaaataatctcaaaatataagcaagttgtttctatttgatagaaccacagtgatgtctttgttctcatttcactatggattgacaaaaacttgacccrgaaaccactggtacaaaccatagagcatggccactataagctataaaatcttaagctagtttctctgggccttgctttctttcattgatagaattcattcattcattcattcattcaacatatatttattgagcacctagtatgtgccaggctctatattaggcattgagaatttagcagtgaacaaaatagactaggtccctgtttcgtggaatttacattctggtgagggcttgtaggtaacaaacaagaaaatactacatggtgataaatgactaattgatattgaatgactaagaatgatctaagaaggagacatttttatggtgtcatctaaatgacaagacccagtgagccctgtgaagatcaaaggaagtatattttacacaaatgaaatggtgcaaaatttcaaacatgggaatgagcctggtggataagggatgaatgatacaaaatgagatcataaaggtaagatgtagaaagtcattgagggtttcaaaagtcaggacaatgagcttggattttatacgacatgggatagaagccactggaggtttttaaataggggtgtgacatgacctggttttaagattactttggatacaagagggagaagtgagtagagaagagccaaawgtaagcagattaattaaaacttgcagtggtacaggttggacttgatggtagaatgacgttggatgttttcaagttggaactgaagactttgctggtggagtagctgtaggtagtgagagaaaataaacaactagtatcaagcttacttttggggcttgagagatcagtggatggggaagccatccactgatcaagtgtgagatgatcaagtgtgaaatagggataataatgaagtttatttggtcatattacatttgagacactaagtatacatccaagtggagagattaagtgggcaacttaatctcaaacttaactgcatcttggaattacctgtagagttaaaactaatgcctgggcccactcctagagatcttgacttcattcatctagggtgtagacattaagattttttttaatatcctcaaggtgattctaatacatagaaaactttgagaccactgactaagagatctaagctagggagaggtcaattgaaggtgtaactttgagtatcttcagggtatagatgattcttaaaagccacaggactgattgagatactttggtgagatagtgaggctgaagaagagaaagccaaggcccaagtcctagggcacctgtattagtctgttcttatgctgctaataaagatgtacctgtaactgggtaatttataaaggaaagaggtttaattgactcacaggtccacatagctgggaaggcctcacaatcatggcaggtgaatgaggagcaaagtcacgtcttacacggtgacaagcaagagagcttgtgcagggttactcccatttataaaaccatcagatctcatgagacttattcactaccacaagaacagtatgggggaaacagacgccccccccgacccatgattcaattatctccacctggccctgcccttgacccatggggattattacaattcaaggtgagatttgggtggggacacagccaaaccgtgttagycccccaatccctggggcaccccaggtttggaggttgagcagaggagctggcaaggagcttaagcagcaacagccagcattgagctcagaatgggtgtcaggccatttgtattcctctttgtggcgtatcaggtgcctgtgaggcaggaattaacttgatcattttcctccctctgacttttctggggttattttcctacaacagggaccagcctcttcaaccttcacctctgttgattgtttggctgccactcaggcccatttctattccctggtcagtgtaatgcaaaccaattcatttagcagctgttcctccttctgattgtttgttccaagacatattattttacatttgtccacattaaactgcattttatcattcattatcccaagtccttcagtgatctgggtccctctgcatttgattgcaaggctcagtgatttgtggtgcctgcaaaagccatcatttgcagatttgaaatccttcttgcagggccattacgtgggtcattagcatcaataacacagagcagttgtacctggcagctttgcagaggtaggaggagacacaaggggctggagatgggtttgttttctttaccagaggacacaaagacactctagccctcccatctcccactcccagcctatgggacttcccttccagtcctgatgatgacacagagagagtctcaaatgatttacagacggcaaatctgggtcttcatgccatcttccccatcattcatagcctccaaaaatctcaataataaaccgttcacagcagcatgcctctggctatctctaatcaagctgggtgtatttttcaaccatccctagcctaattgtaagggatatttctggagatcaaacatatatttgtatttttagcatgagagtcctcagatggctatatctggtaaaccatatgtccctcctaacatcctacaatttgcctttgacccacatgtgagacctaagaaggtgttcaagtgggtaatgcctgtctaatttttgcagtcaggaattcaaggccaaatgtggagctaagaaacaaaccacccaccccaggcatctaggtatctctttctctgcttcttttaatggcatttgatttcattattttcagcttacactttttaatattttaaggcattataaattctctttggaggagtgagatataatcaaagaatccatttattttcttcacaatcactttgagagcaccaactctgggccaggtggtggatccggatgtacagaggtcatgtaggcataaagaagtttccaatctcatagtgagcaaattaatactaaagagaaccattaagctttaaatgtatttttaaaattctgctcctctgaagcccattcccacatgttcttttagtccccagatgtgtcagcgatgtaagctatgcctttcaaccagggcatggcacgttttgggtagttaaatgatttgggaggctggcacttagtacttaatcagatgctaggtgccctgctatgctagaaaccagcctccactcacatgacaatagcaccccactgataaacactgggaacggtgggggtgcactggtttcctatggctactctaacactaccacaaacgtagtggctcaaaaccacacacatttattatcttatagttctggaggtcagaagcccaaagtgggtttcactgagctaagatcaacgtgttggtagggcttcattctttctggaggctgtagggcagaatccatcttcaaagccagcaatggccagttgacgccttctcacactcatcacactccaatctctggtcccacattacatcttctgtgctctccctgctccactattcacttggaaggatccttgtgattatgttgtgctcacttagataatccaggataatctcccccttcttctcaagacccttaacttaatcacatctgcaaagttatttttccatgtaaggcaacattttcacaggttctggggattagaacatgaacatctttaaagacctatttattcagcctgccgcagggtgggaccaggcttaggagtctgaaggttctctgacagtctcagtcactagagagtgatctaggcaacccccaattatccttcctagagtggtggtcctattaatattcatttatccatgttaatccagtggagcactggctgccacatatcatgagtttcagagaacacatgtgcacatgccttcagtgggtggcttgtcccggggtttcttgcatttagtagcagcctttgccagagagcacctttcatcctttatttcatctgtcaataaacgcgaattccttattttcacatcatccacgctgtctgaagtcacccaaaagtgagaagaaaagttcaaagctttacgtattgcacaaaaaagaaactggttacacagataattggggtatcaactccatcaggaatggataatattaagacctcacaggcggctttaccatttgcaaaacgttttcccgtcgattatctcatttggtccacacaatggatctggaagcagtcggagcaagtgagatttttttaatcaccattttacagaagaaaaaactgtgaccaggagagctttastaacttgtctaaggtcacagagctaataaattacagagctgtaactcagtccttggactccagttacagcggtcatgtcctctccaccacactgactctcaaagctctaaggaactgatatgcaaagcagaggcaaattttaaacccatcttgtctgtgtcttaattggacctgtcatttctaaggaggcaccatgaagccatgaaaagggtttagaattaagggtcaggcaaagctactttccacatccatataacttggggatgatgaattacagtttaatgaagtgttttccaatctagccgatcattagaaacccctgaagtgatggttaaaaatacagattttcatgtttccccagacagtaggattcagtaggtccaagggagggacaaagacctctggatttataataagcatgcctggtggttcttataagcaggcaaatttgggaaataaccacccacaggatttttgtgtgaattaaatggaatgatgtatgtatcaagcacccgccactgtgcctgctacagaggagcccttcatcaacgtcaggtttcccttctttgccccacgtttatcagggcgtgttccgtctttccatttccttacatttggttattaatggtaaggagacaagcttctgtttccaatgtatatacaaaatttcagaatgttctcatagaatatatggccatgggtaggtggggtaaatgggatgaagcctttgggtggtggcagtaaatggtcgcttaagaargaatccgctgggttttttgaattctcttcattttctgtgttaactgtaattcaccatcccctttcacctttatccagggagcaggagtatctagcccaacgcatttattttacttacctgctgatttataaaacccaccttctgccttgagccctgagtatattatactcatgtaaacaataaaccccatataatcagtcttgtcaaccaaaccacatcccctgagataaattcagcctcctcacagtggccaggggaagtttcattttgccagcggtttcagcttgtgccttggcccaactctcagaataaacacccacataaatccacctggcctcccatcttatcagtgtggctgcccaaccacgttttttagaaacccgatggcagactctgcccggaaaacaaatggccacttcatggccagagttttcaagagtcttcttcctcagctggggctctgcaaaaaaaggtggtccctacctagagaacagggaccatgtcttatttctatctgtccccaggatcgaatgcagtgcctggcattaggggaaaacatggtatgttgttgaatttacagaccatagagcttggagatttatggtcagattttttgctaagacaaaaatcaaagcaatcctgcatttctcccttcaccccaaacagccacagatcagaaaatcaaataccccatgttcccacgtctaagtgaagcttaataatatgtacccatggacctagagtatggacttatagacactggagacgcagaagggtggcagggggagggatgagaaattacctgatggctacaatgtatgttatttgggtgatggttacactaaaagcccatattttactactacacaatatagccatgtgacaaaactgcaattgtaccccttacatttgtataaaaagataaacagccacgacttatttttctcttaccttaaaccagtggtctcgatcgaggaccatattgcctttcaggggacatttggcaatgtctagagacagttagggttgtcatgactgggggtgctactggcgtctctagtgggtagaggccagggatactactagacatcctacaatgtacaaggtagcccccacaacaaagaactatccagcccaatatatgaacagtgccaagattgagaagccatcccttatatcaaccaatgcyatgcatggctaaaattggttcccctctaattttcccacctgctattctgatgccaacagcagcactgatggcatcagaaaatcagttcgtgttcattgaagcaaagagagatggaaactcatttacagggcacccctgagggccccaatattgtgctaagcctgccccacggattatctcaatcaatacttaaaacaatctattaccatacccattttgcagatcagaaaacaagaaaatttaaaataacttatccaggtttcccagctaggaagagacaaagctgaaatcatacccagctctttctgattgcaaagctagccacctaaccactgtgcagattaaggctggaagactggttgtgaataaataattgtcattgaccttcacccatcatgcaaatcttatctttcataggcaccataaatattccctacaatatagattctctttggatttgtactctaccctggcattctggctctctgggaatgttgggggggaaatggaagtcttttggtctcactgccaagcaatagcatcaatctgccctcttgcttggtctccattcatcactatccaagtgggttccattcccttcatccaagtcttttaatttctcaacctatggtcattctacaccacagaagagtcctcagactgagcatgttattgagggtgctgttgacattcaggggaggacatgtgaccttgcccagaactatagtcttctgcatcccactgtaaatcctttagcattcttgactcctggggagtaagtatcaggagatgtcccctaattagtatgacaacccaaaagagatgtttccaaacactccctggggaacagggtgcgggagtgtcactccccaactttgagaaccactggcttccaaatgctcacccagaaatccactgttatacctggccttcattattgctcacggatacacatgtagtccaccatacacttgcccaaktggtttaatcttccagagctgggaaccagagtttctttgtgtcagagcatttctctttcccattcagaaggaagctggcagtctggacagcaacctggcttaaggctttcgacactgagatctgtagtcatgccacctgctttccttatttccaagcctatgcatttactagatttccttcctccccaacggctgccactcagatcctactcactggtcaagctactcatatactcttcctccatgaagtcttccctgatgaatacaactggaaatgatctttccctctctcttgaaatcccatattactttataccagggatagacaatttttttttccagtgaagggccagatagtaaacatgttaggcttcgtgggccatatggtctcagttgcaactactcaactctgcctttgtagtgggaaagcagtcacagacaatatgcaaacaaataggggtgactgttccaatgaaacattgtttacagatgctgaaagttgaattttatataattttcagttgtcgtgaaacagccttcttcaattgttttggtttgagttttttcccaaccatttaaaaatgtataaccatccttagttcatgggccatacaaaaataggatatggcctgcaggctgtttgctgaatctgctgtacggcatctcctttttattgtggttatcacactctagcccctcagaccaggaacacaggcttcacctctgtgctcttagaaatacggagtctccatttgggaggctgaggcaggagaatcgcttcaacccaggggttggaggttgcagtgagctgagattgcgccactgcactccagcctggtgacaaagcaagactctgtcttaaaaaaaaaaaaaaaataggccaggcacggtggctcatgcctgtaatcccagcactttgggaggccaaggcgggcagatcacgaggtcaggagatcaagaccatcctggctaacacggtgaaaccccatctctactaaaaataaaaaaggaattagctgggcgtggtggtgggcacttgtagtcccagctactagggaggctgaggcaggagaatggtgtgaacccgggaggcggagcttgcagtgagcagagatcacgccactgcactccagcctgggygacagagcgagactccatcccaaaaaaaaaaaaagagaaagaaaaacrgtctcagaccctgccccagacataatgaatcagaatctgccccagacataatgaatcagaatctgcattttaacaagattgccaaaggattcatatgcacagtacagtctgacatatgatgctgtggtttactgtatacttgtttgtgtccatgtcccccacccccaccaataaatggtaaactctttgagggtggagaatgactgtarcatacaaataagaaatgcaattgctttggaacrtgaaggaatgaatgaacggagaaagcttaagtctacagtcaatccttgtccttctttcccttcattctattattagtctctcccaaagcttagtttcctatttgctggctaatccattagggaaggagagggcttactgtacctaagactttctttgctaattaagataaagagagagacagaaacttggaggagacttcagatcatcccaaattgtttaatggagaaaaaatgccaattttatgctcctggatctgtctctcaggagaacttgcctgcatccttctccttcacatttttctcttgactgcattacaccattcctatggccctgtcttagatgttcacctgtcttagaagcaactgagttattaataactttcatagttcctgatttttacctgaaatccctggaccagcaaggccaagttaatgaccacatacacatgctggagggctgcrtattcgtcatctgtgttccccacatggactgagggattttcagttatagccagaagcaacagaagtaaaatattttttaaacrgctttgcttttccgaataagtaaatcagttattcaggctcagcctttcatcctttattgttctataaacatatatacatatatatttttaattaattttaayagtataaaagtaaccattttaaagtgaacaatttaatggcacttagcacagtcaaaatgttatgcaaccacatttatctagttccaaaacactttcaccattccaaaaggaaaccccattatctattaaagtcactcccatttctcccttccccagcttctggcaacctgtctctatggatttacctgttctagattttacatattattatacaatatgtgagtttttggtctgctttctttcacatagcatgtttccaaggttcatccacattgtagcatgtattgtcatttcttccttttcatggcaggataatattccattttgtgggtataccacaaattgccyattcattcattgatggacatttgggttgtttctaccttttggtattgtgaatagtgctgctgtgaacatgggtgtacagttttcagtttgggtacctattttcaattggcagccggtkggggggggggtgtatacctaggagtggcattgttgggttatatggtaattgtatgtttaactttttgaggtaccaaattgttttgagtgcttaccccgtaccaagcactgagttgaagagttcacaaaatagttcacttggatgacaaacatctagagccaagaggagacagagggccacagtagttcaaaaagtctttaggaatttatgacagttctctctctctctctactccaccctgtctccctctttttatgtacatatttggttttttttaattatcagcaatgattaataacagcagtaaccacttctattagttcattctcgcattgctataaagaaatgcctgagactgggtacattataagaaaagaggtttcattggttcatggttctgcaggctgtacaggaagcatggcagcatctgcttctgggggggcctcaggaaacttacaatgatggcaggagcaggtgcctcttcatatggctggagcaggaggaagagcacaagggaggaggtactacacacttttaaacaaccacatctcatgataactcactcactatcacaagaacggcccacagtggatggtgctaaaccattcatgagaactccgcccacatgatccagtaacctcccaccaggcctcacctccaacgctgagtattacaattgaacatgagatttgggtggggacacagacccaaaccatatcaccaccatttattgaacaaatattattccacatagtagatattattaacccattttgcaggctcaagtagcagaatcagaattcaaaccctggtctgtttgacaacaaaatgtatgctctttcaacacactactacattaccacttcctgacagcagaaaaaggaaaggcttaaaacaaacaccagatatcaaatcgaggctgctcttggctgtcaggaagccacagagggctactctgtggccatggactctgtggtagacccatcatcacatttgcaggctggcctgggtggtaaagaagagcacagtctcaggattactaagataaccctgggttatttctactgtgacaagttaagagcccctgacatgatatggaaccgaggtgactctgcctggaatggtagggttttgcagttgtaagtgaagtgggtgcacataacctgctaaaagtggggagtgttgcatatgattcactgtatttaagttagagaagactaaaagctatctctaaaagcagtatctgacgctcactttgcagccaatagggtttctgatgtaagagcaacaagggtaacactgcacctacatctatctcggagcttctcagtcttgagtaatcatcagaaacacctagagggcttcttaaaaacagattcctgggcctcacccccagaaatgctggtgcagtaggtctgggtggggccccagattctgcatgtctaatatgctctcaggtgatggctgtgctgatggtgccactcacagcagacaatcagagtggggtagaggagtaagagcaagtgagcaagagggacaactgtgacagattcccaaagatgacttgaactactttggccctctggtctcctcctggctctagatgttcaccctccaagtacactatctcgtgaactcttcaactcggggcctggcacacataagtgctcaactttaaaatataggaaaacagtttggtggttcctcaaaaagttgaacataaaagtacagagtccagcaatgccggtcataggtatatacccaaaataactgaaaacacgtactcaaactaaaacttgtacacacatgttcacagactccacttaagtagcactagccaatcttatttgtgccaagactcccaataagcagccattgctgacttaccattaatacttaggaccttacaagcatcacggtgcttcatgtccctacaagatatgtgtagatccttctcaaaagcagagtgttccgatgggagtgtctctcacatgcaaatgtcttgcatgtgtcaagtaagagaaaatcttattcgttgggtacaaaagtaattgcggtccttgttcttaaaacttaaaactaatggcaaaaaccacaagtacttttgcaccaacctaagagaactactgattgagagaattgggagttgttgtgtgttttttgtttttgtttttttttttgagacgcagccttgctctttcgcccaggctggagtacagtggcgcaatctaggctcactgcaacctccgcccccagggttcaagcaattctcctgcctcagtctcctgagtagctgggattacaggtgcctgccaccacacctggctaattttttttttttttttttgagatggagtcttactctgtcacccaggctggagtgcggtggcgcaatctcagctcactgcaacctctgcctcctgggttcaagccattctcccctgagtagctgggactacaggcacccagcaccatgcccagctaatttttgtatttttagtagagatggggttttgccatattggccaggctggtctcaaactcctgacctcaggtgatccacccgccttggcmtcccaaagtgctaggattataggcatgagccaccatgcccgactgagaactgggaattttaaagggcacggatcccattcacattgctcaggccatacagaataatgacaattatgctaattactcctccaaacctcatggcagtttgggggactatgcttttccctcctccggctgcctccatgggcagcatcctctgcaaaactacgctttcttacctccttgcctcttacaaaggagcgcacagccttctggagacagttctgtttgtttaaggcaacggggggcaacaggctgtgtgctgargatgaaatgggagccatgttaatttcgtgttaatgacagcagcgcaattttcttacaggaaataactagttaccttaatcattttaagtagttattagcagcagcctaaaaaggatggctatgcttatcacaatacacgcacaaaggaaatgaagacatgaataacaggaccttaaacagacttctggcatcttccttctgggtggtattaaatggtattaatctttttaactgacttcaatcctgagtccacggccacgtgataaaatgttaagtgaactgctggaaatagaggtggtccccccagatttattgtgccaatttaccagcagcggaagagcacaccactgckgtgagaaaagccatagaaaagaaagaatgacaggtagatgtatggattaattagtataatgcagataatagcatcttttccaatattaatacttcttcagaggctgttctatatatgcctctgggaaagaaaaaagctagaatatattgtttgctatttcatcccatcccccttgcaagatagcaatcagagttaagaaatgaataaaactcagacaactttatccagaccacagcgacacaataaaaaagaaaaagtaaccacagaagaaggataaagtgcttgttcaagggttttacagttaagacatgtcaagtaatttttttcctaagtaagaagactatttttcttccctgcagtggttgtgcttgtgaaaggaatcagttggatcaattcagaaaaatcatctatatcaacaaagtatatttagtgcttatggtgtgtcagaagctgtgctaggtcctggggaaataatttctataaaccactgtctggccctcaagcagctctcattttacctgggagatgcgctgtacacaaatcattgcaatatgaagcagtagaggccttaatagaggtatgttgtgggcatgatggtagcagagaggcatgcatgagcatctctacctggagggtgaagnctgagcagggttttgaaggatgagtaagagttttccagatgaacctgggggggaaggacattctaggaggaggggaaggtgtgtttacagatacagatgtgcaaacagtcaggtccatgcagtggcttggcatggccggcttatgtgggctgggcagggaggtgaatggtgaagctggaggtcatggtgggcctttcaggccggataaaagagcctggacatttcccatagggaactaaggtgccactgaaggatttcgtttgcagggaagtgaaatgtttagacctagagccatcacaatggctatggagagactggcttcgagagacataaggttggaagcagcaagaccagttaggaagtgatgcaataataaggtgagagtacttgaggccctgatctgaagcagtagcactgggtataaagaggacagcaatagttgcaagaaccatgaagtgtattacaaaaattcacagaacttcatgactaatgagctctcatgaataaggaagacaaaagagtytcagtaggcgcccaagtctataaatatagcactgggaggatgatggccatgttagaggggatgaaggaagaggaggagatttggagtagagttcagggtggcaggataatgagcttgacttggaataggctatttgaagtacagaattcccactgagtgctcataagtccttcttgcatagacacaatgattcactacaaccagctgaggtatctgcatgaattgcctggggccatcccttgkctctaccatctgggacatcaaggttcctgcttaccaaatgccaaaggagaatgaactcaagagaggatccagggctggctggggctagggggttcattttctcatcactgctcaacccagctctgaattcatggaccaagaaagcaaagaatggccctttcctgaaaccatccaatgtgataggcattaaggccacaagactgttcaactcagaaagaccaacaagagaggtgtgtgttttgtctcagccaagacagagtcaagaaaatccatttcttgggcatgccttggaataaactaagttggtggagttcttccaagtctcccctcctgcaaagccactggaactccctccccactagaaarcagccagagctcagggaactcattttaacttttccgggagaagactgagactgrcagggtgagggatctgggctggtagaattcatttatgttcaattcagctcccctgggcagatagccctggcatgggaatcaagaaatgagctttttctgaatttctgaagccctttctgagacactggagaggactcttaaaataatgcaggctatctggagttcacttkcattctggcttctggttaagagccaggatctgatattgggctcctggggtccaaattctagctcttcaacttattagaaaagtgagatattgggtaaactacttaacctctaagttttggtcccccggccccccaccactctgcaaaataggggtgatgaaaatgttattacctaaccccacaggggattcattgggaggctcaaataagataatgcttataaaacaccaagtacaatgccttggtgttgtacccagtaaatgttagctgcaatactgtactcacttagggcagctgatcccaacccaggtgctagttactcgtttgcaaaacagtgactaaaaccatgggctgctagggaactttatagcgctagcatgctgtgatcctgtacacactgggcattgagccatcatcgtggtggtggtagcagcagtagtattgtttgtgtgtgacgatctgtgtgtatttgggggaagaggtaataagaaatgtgggaatatgggtaacttaagattcttgagtgcctattgcatgtctggtggatactaggtgttttacatgcactaacttatgtaattcttacaacaactggggaaataaacagtattatctctaccctaaagatgaagttcagacaggttaactcaatgccctaagtcacagttatgaagtggcaaggctagggttagatttgtaactcttcttactactyacaggctatggaggaactgctacaagcagagaagctatcattgaaagcacagtcaagcccatattttaatgttactttaatgttacaagatttcaaaaggaggaagacagcaaattcatacaggaaaatccagaaggccagcatggaggagatagcaatttaggaggggcgttccactaacagaaattacagccaaaacaatggccattcctggtagagacaaaccgcatggataaagacccaaatgtggccgggcgtggtggctcatgcctgtaatcccagcacttttggaggccgaggcaggcggatcatgaagtcaggagatcgacaccatcctggctaacacggtgaaatcacgtctttactaaaaatacaaaaaattagccaggcgtggtggcgggcacctatagtcccagctactcaggaggctgaggcaggagaacggcgtgaacccgggaggtggagcttgcagtgagccaagatcgcaccactgcactccagcctgggcaacagagcgagattccatctcaaaaacaaaaacaaaaacaaatacaaaaaaaatgacccaaatgtgtgaaactgtgagtcatgttcagggggcatcaaaaagccccttcagcagtaggtgtatgttgtaaaggaggaggtgagagaaggctggaaaagtcaggattggactatggagaaccctgagggacagctcagggcagggagccttgaaggtgggaaggagatagcattagcagccgggaagagccaaaggccggcccccaatcagaacctgcaggaaagggttagtgctgtgcctggggtagctcctacctagaagacagaacctgagacttaacagctgacagatacaccaagccagctgtgcctatttctccacagctgacatgaagtaaaacactaactataggagtgcaaggggacttcattccacaggggttcatttatttagccaccccctaagtctgattgacaatcccaagtcccagagcacttccgtctattagaggccagataacttagtgcttaacattttgtttttggcatcagacacaagctcttgttctattaaaaactgtgtgacctggatacattacttagcatctctaagsctcagtttccttaactctaaattggaggtgataaggttctcatacgtcgatttttgcaaggatcaaatgagataatgcatcagaacaggctaacacagccctggctcacattatagcccaataatgttcactagaattcactagtggtggtgttactcattgtggatataagagacaagcacctggaaacttggggaagtatggatgctacagataaatccagagaaagagctggaatggagctcagggatcactgaacccctcagccagggcccaacaagagaagattaattccccagattcaygcatgagttggtgtcccagagattccagggggaaaaaaaaaaaaggaatgcggacccaatcaatcagggaagctccccacaatccttggtgagaaagcccacaaaccaggtctaacatgtggctctgccttttactgactgagtgaattcaagcaagttatttcacctcccccacttcagtttccccatctggtaaatggggacagtaatccctgcctgtacacctgttgtaagaactgaatgagatgacctctgtagggcattgaggaccctgctggcacatgggaaactctccttaaatggtagctactataattcttttaaattgaaggtcaggcaagggtccattttcatgctgctgagactgggtaatttataaagaaaagaggtttaattgactcgcagttccacgtggctaggggagcctcacaatcatggtggaagatgaaagaagagcaaagggaacatcttacatggcagctggcatgagaaccaagtgaaaggggtttcccctgataaaaccatcagaactcatgagacttattcactaccatgagaacagtatgggggaaaccaccctgtgattcaattatctcccaccaggttcctcccacatgtgggaattatgggagctaaaattcaagataagatttgggtggggacacagccaaaccatattgtgtccaaaattggcgggttcttggtcttgctgacttcaagaatgaagccacagaccctcacggtgagtgttacagttttcaaagatggggtrtccagagtttcttccttctggtgggttcgtggtctyactggcttcaggagtgaagctgcaggcctttgcagtgagtgttacagttcttaaaggtggtgcatctggagttgttcatccctcctggtgggttcatggtctcgctggcttcaggagtgaagctgcagaccttcgcggtgagtgttacagctcataaaagtggcatggacccaaagagtgagcagcagcaagatttagtacgaagagcgaaagaacaaagcttccacagtgtggaaggggacccgagagggttgccactgctggctggggcggcctgcttctattcccttatctgaccccacccacatcctgctgattggtccgttttgacagagtgctgattggtgcatttacaatcctttagctggacacaaaagttctccaagtccccactagattagctagacactgagcactgattggtgcatccacaaaccccaagctagacacagagtgctgattggtacatatacaatcctccagctagacataaaagttctccaagtccccacccgactcaggagcccagctggctttgcctagtggatcccacactgggccgcccggcagagctgccatctggtcccgcgcctgcactcctcagcccttgggcagttgatgggaccgggcaccacaaggccatgcgggagcccacggcggggatgaggttgcrgggtcttgggcatggcaagctgcaggtccccagccctgccccacagggaagtggctgaggcccagcgagaattcgagcttggtgcaggcaggccagcagtgctgggggacctggcgccccctccacagctgctggcccaggtgctaagcccctcactgcccagggcctgtgatgccggccggccgctccaagtgtgggcgcgctgagcccaygcccacccagaactcgcgctggcccacgagtgcaggcacagccctggttcacacctgcgcctctctctccacccctccccacaagcagagggagctggctctggcctcagccagcccagagaggggctcccacagtgcagcagcgggctgaagggctcctcaagtgtggccagagtggatgcagaggccgaggaggtcccgagagcgagcaagggttgctagcacattgtcacctctcaatatcaggacagtacaccrgacaaaacagcagcttgaccaagtctacagatcgaaattagactgtgtttgagaatcagagacctgnatttaagtctagatctgttgataaacaaccgagtgactttgggtcctcagctcctcctgtctgaaagacagtttcaaagcatcctggcctaattcacagaagggctattgtttgggttcagaaaggaagtgggcaggaagatgcattgtaatttataaagctctgcctgcaagagctgggtttctctctctctctctggactgagaaatgcttgaggccaagactgagtctcttcttgaaatcgcccctccctggtacagtagctggcatggcatgcatgccaccactctgtggatgggaaccacactgtacccactcgcccttgggaatgcctcagactccggctacccaagggataaagacctttccctctagctgacccagttctactggaaacaacctttgccctggcaaaagacagaggccccagagggagccatggtatttgggggtagaccctttgctgaatggttgggcctgggttacaaggatagggaggaaagaatgaaaaatggaatctgccccagagagattgggaccggtggtttccaagtaaagccacagtgctctcacatacacacagatacacttggaatggatattgaagtcttaatatagagtgcccacacgcctgttcccaagtgctgtcagcaamatgctgtctctgtttccctcccagagcatattttggaagcttaggacaagggcaccatctggacttccctgcagtacagtgagagtaatttggctctccctccttctgtctcctttccccactgtcacccccaactcacctttcagtcacaggaccaaagatccctctgtaaaacaaaatccactaggagagaaaagaatcagctgcatcctgcacagaagtgacrttcaatgaccacacagrgtgcagcaggaaggatgttctaacccaaggtcattttttttttttttgcttgctcagcagaaatatgtagcacaaggagctatcaatcattcttccaatttacggatagggaaactgactttcctagccacagccctccatctgggcagtacacacacatatataccacaagggctgttttaaactgggtaggaggtatttgggattgacatcatgatggaagtactgcaagcagttagtgggagtggtgcaaaggttctaaaggccctgcaagcaaggggcaatcacacacaatgaagacttgctcagaccccactgtccattgacctctagcaacactgtctggggagcagggggagagctggattctgagatttaacttggcccaaaagccctcccatcagaagtcacaattcctttttcaatgtggtgcattcctgtggctccctccctcctatgtggcatgtaagagcccgtaaaacagatctcattgtcctctggcatttggcttcatttcaaattgcagcaatgggctggaatcaatatgactatccctggattgttcaaattagttcctgaatcattgcttttatacttttccacataaatgtgggtactttcttggtatttggtttttcttgccatttattttccaataattggatgaaatgtgtcttgtttcttggaataagctaatactttcctgtgcttgccaaaagttgttttgtgctcattagtcatcttttataatcttcttgggtgcttttcccaatttttcagaagcctgtgttgggatctcctattccctgcaatctgaattgatacatcattttcttatttgcttttttattttaaaaaatcactaaataatttgtggtgccttgtatagttaaaatattaatactccagatattcaaattacttttaacttgtcaagtactggcacatgagagaggttattaaatttgagtgatatgattccaggattaggaatacctggctcaccaagaacctgggcaggctctggaagggcaggaataggggaaagttggcaggcagttggtaatgtgatttctggaagaatcagacaccacattgagaaaaggcgctayagtaaagggtcacttccctctagagttttcaatcgagtgtcagaaacaaacctgctgtcatcaacattccctacccctgcwcgtacaacccccttctccatcttcaaactttggatgactttccactgttctgaggatagacaatattcttaccagggtctccaagcatgaatgtggtctgtccttacctttttctcctgggtcagcctacctcattccccttcccttctgggctccagcctcttcctcttacacatggtcttccatgatgctacaggacacttgcatatgtgcctcctactgcctctaaggtcttccctcttttcatctcctcatgcccagcacagtgcctggcacatgggaaacacatacgggtttgttggaagaatcaatgagtgaaggtttgagatattttgttttgtttggatttggtttgatttgacctaagcacgatcaaatgaagaaaccaggagtcacaaagtggctgccaggagaccctgggactaagctgcacattcatattttttggccatggcctttgcctagccttctyctctgttgagacaagcagcctggtcccatagtcatccatttgcaaccccaggcataaacatgctgcctactgaaactttggtttaaatatttggtttcaattctacatacagtcacataccacctaacaasatttccttcaatgacaggctgcctatgtgacagtggtcccctaagactacaatatcgtattttgattgagccttttctacgtttagatacacaaatacttaccactgtgtgcaatacaattgcctatggtattcagtacggtaacatgctgtgcagatttgtagcctaggagcaataggctataccatataccatctgggtttatataagtacactctatgatgttcacacaatgacaaaatcacctaataacacatttctcagaatgcatcctggtttttaagcaacatgtgactataacttaattgactttgatggaaactcaagaggcaacatcctatatttcccatcagtgttttagaagaatgacaaaaccctgtccttaaaatctccatgttttccagataaagaccctgaggtctaaaagggagcagtgactcacygagcacacctacctactgaatgacagagctgtcattcaaactcagcccctttgactcccagccctgtgctctttctaatattcatcccctacagtcaatccactgcgggtttaatggctttgaaataaaccagtgtgtgtttctgcttattaagtatcatactttatgcaattaatgtgtacaamaccaagcctagttttgtgaacagtttatccaaatcgctgcgcagcttcatttatgagaggagagaaaaccctcctctsttatctaatagatgttatgtgtctaattttccatgaatatatcagttaggacagtagccacctaaagtgactcttctgaattaaccctgagtgaataagatggctttggcaagcagtgtgtgaggattcagtctttccttcctccaggatggggactaactgtgaagtgagctagaaaagtcttctccgtcaaccccttggtgtgcatctactgcaggtactgagagtcattgcccctggatatttgaaaaatcacattcctctccaatttagttatatctataccagtgaagctataaacytttatgaataactataagaggataaaacttygcattgtggtctcccgaaatatcattcaatcacattgccctctggacaccacattgctgaagctttcagagcctttctcagcatcacagagacatgctttggcctgaattgtctcatgatcatctagaagctgtcttccttgttcactccagagctcagacctcaggcaaaagacatcccaggcatcaggttgaagcattagattctattttttttttttttttgtatacttcatccatttaagtgagaagtaattccactaaaatggatgttaatttggttagctctatctaaatacaggtactccatattgagatgttcatgtccctttttttctgcttcattcaattgatgtgctagatcacattggaagatttctccagcattgatttacccttaactcctgatatgagccctacttgattgtaataaattatttttaatgctgttttccactagctagtattaattttggctttttgcatatatgatcgtaaaagatattggcctattttcccctcaaatatctgctggaatatacttataaacccatctagaccaacgcttttttttgcgtaggagatgaccaaaaataattcttgccttaactcaaatgaactacataacattaaatctctacaataattaaaacaaagcgagcctttattaatactatttatgtgggctctggaatgacttaatatttaacaaaaatgccctacacataccagtacagtggttctcatgggacaaactcttccacagaaatagcaacaatcctaaaagagaaaaggtatttggtatgagacatgttcagtatatctattttcrtaatacaagaatacgagctacagaaagaaaagactggcaaaatcttcttggtagtcatctgacaataagataaagtaagatgcaaatgtgaatgatatatggactgtcaagaaatacagtcccaaagtgtgaatggcctgactttgttgttatctrtggaacttaacacgtcacttcatcattctagggcctctccctttatcagagccccagcagccagacatttctaataataatcactgcaactcccatttaatgagggcttactttgtgccaggcactgcatttgaagcctcctttatcccatgtacacctgagctcatttacatgttttggttcatttaatcagcacgattatttgagtggttatgttgtcatcacagttttgcctgtgaagaaattgaagttcaaagagaccaaaagacccaggacttggagccagagcctaactctcctcatccatgccctgtgttgggatgagtttgaggttgyaggagcatggggargaaataggcttaactaaaatcagcagaggtttcaaaaggacctgcagacctcatctctaattcttggatggtggcagccactgcctacaagtcacttctgggaggatctagacgtcgttgcaggaggctcatcccactctggctttcagcagcttctttaataagaagtggaagggatacagaggctctggggaaaggatcatagaagaaaagttggcttctagaaacagctatttcagaatgtttcaggaaaaaaaaaaaaagcatcacggaacttccctgattctttatgtgttttatctcatctgtttatcttgtttacttataccctgccaagttcctgaaagactgtgtcattatcttgtttcactctcatgacaattcttagatagatgcatccctatattatgcataaaraaataatcagaggggataagtagccccacattacttggacagaagaggtatctgactaggctcaaggtcttgcattttccagcatgatcctgcacccaaatatatcactctacatttgtgcaaactcccatacaacttgatgaaaaacatgctttaaaatccaagttgtgttatcttttgggggaaaataattacattccatgctggttttctaggttggtatgatagccagaccacatttggggatcttctgtcaatgaaactatggaaaattatttttatttttagccataattgcattccatagcctacaatgcagaaaatctcatcaccggacagacccatgataattaccaaaccttagggtgagaatgtggtggctggtaaacatcaaactgtgttcttctctgcagactgtgtgtgctcttatgcatgaagacaaacttgttaatgactttctataaataagttckagcttatagttgttccagcaamagctgctgaaatgtgatctcccctcaaatacagaacacctttccttttctctttactttcctgtagaaagaaactatttgcatatgctaatktgaaatgaatagtcactgtcactttttgtctgtgtgacctcagaagaggtgcttaacctctctgtgccttaatgtcttcacttcacctatttattttaggaacaaatgtggtaatatgggtgagctgttttaggctatggaatatacagcattcatctctggacttctgggatctggcatagggtgggcatttgggacctatacgttgactagaattcagctcatttgagttgaatatgccttgaaaagtttaaaggactatataaaggtaacaatagtaatcatcatcatttaaaggaaagggagagcttaatgcttaggttctctcaacatgtattttcctatctgtatagaacacttactggaaaatatatgactggaagttctttattcatctcccaaatttaaactagcagcggtcagaaaactacagtcacagaccaaatctagcctacgctgtgtttctgtagctttactggaacccagccacgcccattcttttatattttgtccatgactgctttcatattataaaagcagaattgagtagttgtgacaggtactatacagttggcatagaaaaatatatttactatctgaatctttacaggaaaaagtctgctgacccctgaattacagtatgagccattcggaatgcatttctctttaaaagttctcgcctcattcagtgtctggaacacagtgggtgctccccaataggtgacaccttcctcaagtttccttgggagaacagactcaatgtcggatccacaaaggagacctgcacatacctaacccctatttctgcagaagctgaaggctgtattatctattgcttgcataataaataytgcataacaacaacaatagtagcttactatggaatggttactgcatgccaggccttgggctaagtgcttttttatattcggttttatagaatcatcacacagtgctatgagtattagttatgaattattactatccctsttatagatgagagacttgctcatgtaaggggacccaagggtgaaaccaggctttgcaacccacrcagcccaatgtgatactcagtgtcttggttcccattagagatamcctttggaattccagactgttctttaaccagttcagccaagcgccttgttctctctgtcccttgggacatcacacttcattgtacaatagacagcctgcattgcttcattcattaacaattatttctgccttgatacagttaatatgtaccaggtataggagatgtcacaggggccaataagatagagcccatgcctggatgaagcctaaagtcagtctagggaaagaggtgagcattcatcagtcacacaacgaatgtcaagctaaaactgtgatatgtattttgaaaagtacagagtgccatgacagtggatcatggggatctccctcaacaggtgacccttgagctgagatacaaaggagttcataagtaggagtcaaacagtgaagggagggaagtttattccctcccttctctgtttaagggaagggaagcataagaaacagaataagcatgtgttctaggaaaggaggaagcccagtatataagggaggctgaaagaaagacactgagcagagcacagaaaacaaggacacatggttagaaaagccaggggccccagatgtgcatctttatgttacaggcaaggggaagccactgaggtgtttaagcaggggtaaggtgatagcattgtcactgtgaacgccacgtgtggtcttctgttccaaggctgctcttttgcgctcacaaaagggcttctgctaatggagcatcacgctgagaaaggtgatctaaggtctgagaacacagcctgttgccctcctgaggcatgaggggtgagtgagcagcccccggcatgcactagtgyatcaccttgctaccacaaaatgaaaactctgagacctgtgcaactgaagctgctcccagcttaacctatgacaagtgtggcttgtgtcaacttggaagcctgcttgcagcaggtctgcttatttaacacagaggagtacttgtctgttagcttgaaagctgagttacyggtcaccaaaggccaatggttttcaggcttccacttcaattaagtgcataggagaaactttgcctctggtcctaagaaaattctaggacataagtgaaattcttcgttacccttaggatggaatcaagaccccctaccttggcctgccaagctctycatggtcttctcctgccttccaatacaatttctcstcatatcaccctcccttacttaggagttgttcaataaacacatgttgaatgattggatctatgaatgactgtataatcatgggcaagacatagctcctctttgatcctcattttcttcatttttaaaagtcatgggctgagaactaagaccttgattttctctaagaccccttctaagattctatgagatgcagaattggtattcattcagcaaatgcttgccaacatctcctctgagccaaakcccatcaccagggatgtgatgatggatatccatgcccttgagatgtttacccaaaagtagacacagactcaaagagaatagtttcaaaatagcatgtgcttgagtatgaactcaaatagtcacaggaactgggcacaatcccacctctgccactatctctcagaggcttggtgtccccatgactcaaatggaaataatggcactaactcatagaagttttcaagaattaaatgagttgtttctgctggcatcgtctctcacacaaagaggtgttcgacaaatgttggtaatgatcatccaaagtggtgatgatgactaactttaacaatgatattcagcactcatgtgactgtactgggcgtctatggtttacatctgttctgatcacccggtacccrtcccattttggttgcaaagtattttgaattttgattagtcagggttctccagacaaacagaatcagtaggctatatacatagatatataagaggagatttattgtgggaattggctcacaattatggaagccaagaagtcccacaatgtgcagtctgcaagctggagaaccaggaggtgctgatggtgtaatccccaatcccaaacyacagggagagaggtggtcgctagtgtaagtcccagagtctaaaatctgaaggcccaagaaccaggagctctgatgtccaggggcaaaraaagagggatgccccagctsaaggaagagagaatcctccacctttttattctattcatacctgcaatagattggatgttgcccaccctcgctgataaggccagatcttctttactcagcctactgattcaaatgctaatatcttctagaagcaccctcacaggcacacccagaaataatgtttttcctgctgtctgggcatccctttgcccagtcaagttgccatataaaattaaccatcacaaatttgcctcctgggtgagagcatcatgagagcagaagggagctgcacttggtgttcagagacagtgtttcatggaaggtgtcctggagaaggtaagacacaaagagaatagttgcaaaatagcatgtgcttgaatgtgaactcaaatagtcgcaggaattgggcacaatcccagctgaactatgaggtaaagaagggtaggcaaggcttcctcagtccccactttgccctcctccacaccagagagatctttcaaaaatgcacatcagatcaattggtttcttatttaacacctgtgacttcctattgtgtttggaataaaatcaaagctcctcaccatggtctacaaagccttgcatgaactggtcccatcttgagccaccttcatcctttcccagccattcctagccgcttgtccctatctcaggctctttgcattggccgtgttctctacaagtgatatgcttccctctgatcttcccatacctggctcctggtcatcaggattcagctcaaatgttagcctacccaaagacttttcaccaaccatactacagaatgttgcccccacttctgcatcctcgcccccattctttccactactacctttcaatctgtaagtaagtcaaaatcttgttttgtttccttcaaagctatctttgccaccatctgaaactatctctaggaggacaaagaccttctcagtcttattccaattgacctcagcacatagttggccctcaaagattttttgaacaaatgaattccaggcccatgtaaaggattgaggtgaggtggcctttctgaratgagaagtcaagtcacatcagatcatggaggacttcttagatatagagaatgcactgcatcatggcaccagccatgtgggagcatcatgacaagactggtagtattctccctggaagactgcctgccatttctcagtcttgcatttccaggaagcttctctaggaggatactcgcctaaaactaatttaaaaaatcaagattattaaataatttccaggaatccaggtttaaccctttcacatggtaatgccaactaaactagcagaagccctcaaggcatctctttaatgaatagcttaaattcttgaacttgaacttggtgtttaattagcatgtcatcattagcccccgaagagtttgctctcattgtccctgcagtcttagtcaaatcatgcacttgctcagacagttgaacaatcacttattgatcatctgtttcacatcagacactgtgattactctgcataagccttaaagttggggctcagttaaggtatagcttagggcccatctaanttattcaaaattcagactttatatggttgagatttaaaagtgttacctatacatggcaaaaagaaatccatccacaggcatcactttcagaacccatctgccaatctgatactctgtccctagcaggatgtggtttgcacattgctgctccccaagcccaaagtcatggtaggagaagcagtgaaccctgcttttctccagacccacctggacccatgcatattgtgagtggttagtgggtattgggttagcattattgtgcctggctagggaagagcaaaggcaacagctgcaggaactgtgatcaccaccaacaaagacctggaaggcagtagaaaggaagcagcactttttcatggttaagacctgctgttcatgcatgaactgatacaggtcccaggttatctttgatgcccaaactgtgttcttacagctgagaacaaaaagcctggtgactgtcaagctgtctcctgtgctcttctgttgctcctagatgttctgttgcctggggaaatctcctggtgcctcttcagcacacaaacatacacattctgtaaactgcaaaggyctatagagcacatctctgccttaataaccatcatctgaaattaaataccccccaacctccacctctattttctcctggctccaatctaccctcttacagtccatgctgattatctcattcccctgctcaaagcctttctattgctgacattccaggggtcctatgatctggactcagcctgttttccaacataggtgatgcatgtgctccttaacccacccaaattgaagtggagaaggggtaaacagccagacaaaacaggactctgctcaccagccaacagtatctgctatagcagcacttctgaaactttagcgtgcatccaaatcactaggaatttgagaaaatgcagatcttgattcaggagacctgggatggggctcccgattctgcatttctaacaagctcctagatgctgtggctgctgctgatccctagagcgcacactgtcatcttattaacatctgactgggggtcagaaagaaaatgctcaaaactcatattcaaaatagctttatttctagaatgtattaactataaattcaccagttttgtaaagcaaaagatcaatttcatgtggttcaacctaacacaatagacagtccatcaacaactactaatagaaaccaaagctcctgatatcagaatcctagccaactcaccttggaacagagaggaggcatgacttcagatcaaagttttaaatgtgttaactcaagcttaaagcacagcctcagccctgtacttgccagctcctttcttacagttcctggctcccaaaagaaccccaccctgagaggcagcccatggcccaggrgacttcttcctgcctttttctgccttgcaagctggacagaaggatcactccactggattgcctttcatgtccctcctctgttcagaacatgctttaacttcaaggcatgtctggaagcactggcacatcccctggcagttttgttggtcacctgtatcagtgggaagaagttagcagatggcagggtgtgttttgttctcattagaagcttactcagcactggaagggaggtgtgctgagtgtgtgagaaccccccagtccctggttcttccaccacctggcaacatttctccacctgcagaaagtcctggttgtgtgggggtacaagggaggggggattaaaagtcctgcggaggcagagcaacgcctggcctgcggttgcctttctgatggcagagtagctactatagagtcatccatctccactggcaaaactcataggtgaaaaagcaataagcaaataggatatttcaagagcagcagtaacatgtgctctcttcatgagaagttcctctacacctcaggaggctcaggatattctcagattcaaggtactgtccatctgactaggcattgatgggatattaatgttcattgattatgttccacttgttctgaagtccaacttccctctagctggtaagcttttgatgaatacaagtatcatcccaaatcaattaaatcagaatgtgagaaggcatagacaggcacaggtgggctttaaaagcacccaggtgatctggatgcacagtgaaggtagcaaaccactgggttagatatggtttctttttctcaaagttcaaggaaaagcatcttttttgatcatcacatttctcaacttctaaaacwtcaccttttttaatgcaattcaagatattggcaataatgagtactctcttacactttcagagtcacaaatcacttctacatgcactaycttattggattctcaratcagcctgtggaaaatgctaacaccattacagaaagatatatgatgtgcttgctgtgacattgtttataagagacaaaaaaatggaaacaacacgaaagccagcgagaagatggttaaatatgttatgggtgtttgtgcaactgagaattctatagttatttggaagacttggggagatctatatgcattggcttagaaagatagctacaaactacttttaaattttaaaaaatcaagttcagaatcataattattaatcatccctttctgtttttttaacagttactgtggactagggaatttattattttttatacgctatgtgtgtttgtgtgacttataagcacaaaacaagtaaccacaaggatgtacactaaactgttaatagttgtatgtatagcatggactagaattagaaagaggtggtggggggggcatcacgttttttacttctatattttaatttgttaaaaaattatgcttctggccgggcgcagtggctcacacctgtaatcccagcactttgggaggccaaggcgggtggatcacgaggtcaggagatggagaccatcctgggtaacatggtgaaaccccgtctctactaaaaatacaaaaaattagcctggcgtggtgacatgcgcctgtagtcctagctacttggaaggctgaggcaggacaatcacttgaacctgggaggcggaggttgcagtgagctgaaatcgcgccactgcactccagcctgggtgacagagcgagactccaacttaaaaaaaaaaaaaaaattaggcttccatactgttaagaaaaaactgttttaaaatcacagccctgagatgatgaattttaaggaaagatcatcatatccatttttcagaggaaacaattgatcccagtgatgtggggtaacttgatcatrtggctaaaaattgctggagcatctgtttgaacatatatgtatgtttatacacgatttttaaaaatgaatttaaaaaaattaagtaacaggaaaaaggctcaacaggtggactgatccttattgaatgaggaggaaataaagtcctacacaaccagatgaccgggacaggctggtgcatcagaagcctgatccatcagctactactgcatcttgcaggctggccagtttcatcccagtcatggctgactcaggacctaacagctccctgtttgctccgaggctgcaaggaagatttactggctgccagtggcagctgttggtggtgcagcagggacacaacatccacccctacagggcagttccrttcctaataaggaaaattcactttacacacgctttaggggaaatgtcctgggatggagccagagccagatgggctctgagcttatgaaaagcatgcttgttaccagaaaacatttgcaaatatgtatgggtatttttgtgtgcgtgtacatgcattttacacacatatgcacacacatccctctgaaatcccttcaattaaaattgtcttccaaattgttcctcaatatactttgcagttcacccttatgtaggggcaggtgctatgcctcataccttttaatgttggattattgttctgattcttgtttttccctcctgccaggtgcagctcatccactataaccatgagctatatacgaatgtcacagaagctgcaaagagtccaaatggattggtggtagtttctatatttataaaagtaagtctcttgcattccttcattcttctcaccatccccacctcaatyagaataccaatttacggtctctgttggagttagaaatattaaaaggggtgctatccatgcctaagaaaactatgggrtggtgccttttatatacatgagatttatgaaaaatgaggccccctgcagtgagatgcaaaaatgataatctccatttcagagcatctgggcctgaggattcaagcagcttctgtcctagaaagaaaaagggggctagatccagggacaggctttaggacccacctaatgcagtgaaatcagaaggatataatactagaagggtgggtggctcactaatgccccacaggattaaagtcctgttcaccattcagctgccccttgtaaacataggaagaagtgagatgtctctcccctccaggcactgcactaaatagctccttccagcttcctcacaattgctctgagcatcatctttctctctcgctctcccgttccttcataagcctccctggtaataagattacccacactgactttatgacattytgaggaaactccacatctccctaacagtcaacaacgacaacataaaatctccaaccaatcacattctaatttgtttaaaaaaaaaatactaattacctttaacattttagcagatgtagagagaagyaggtatgcaaattttttaataaaaaaagaaattgcttttctaattagaaaaataaaaattaaaaaaaagcaatgtgtggcagttccaaacattagcagtcaccatgctagcccctggggatgttttggccagatcattagagaaagtgccccaatcggaattgggaatctgatggagatgatcaatagatcaaaactgccaccagggaattttaacagggctgtcatgatgacatcattattactcagaagaatgggcacctggggcactgatccctctccccgcccccacaaaagaattaccccgtgccataggcacttcaccctccctggtcatccatgccatgccccctcctaacttcctcaccctccccttggtcagatcagggcagacctatgcactgggcaggggctggatggggcatccatggcatgttgctatccctggccactaacctcaacctcctctggtttgtcattaacaaagagaggaagggacatttggccagggaagcatatttttaggctttcatgcctttgtgatacttgacatgacatctcaaaggaaactggtcccagcacagattctaatggtatctcctggcatcatcacaaaccctggaataataaacagtagatttctgaatgccagacactatgatatgtattttacatctattttgttgtttagtaataaactcagaggttgaacattcgtgttgtatcttacagatgagtaaaattattcagagaacctttgggatttcacccaagttcatgtcgcttataacagcccagccaggagaggatccaagtcttccctgactttaatactcatgaaagaatggcttactcattctatgcctctccaatagagctgggagagagcaagtgagggcaagaagggagtacatgacattttaaaacattcttcccacactccccacaaccccatgctactcataagcacagggcaaattcctgtatctcttaatcaagccctgattatggcattgataaccaatttgtacattcaacctaggctgcactcactgtgaagccgtagataggtcacaatattgtcatgtgtgtccaggagctcacttccccctatgactttcccagcacaaatcctgcctgccccagcaattcctgtcctttggagagtgtctcggccttggtcctgactttacctcatgtgtctgaaaacttgagtcagtgactgtcattctggaggcacaggcacatgacagctgacagagtgacggatacactgggaagccaacaacaaattactggtgtgtttcacaagctcctacagaaacgttcattcctaccgagctsgtgactagcagctggggtttgcaagtccyagttgcttgcccacaggctgttgaaagaaacttaggctgtagaccctgaggtcagtgaagggataataactagctcctgcatcttctcaggtcagtttagctcctagggatgaagccattctttccctgagcagacctgaaactttcttgctagatctcaaaataagccacaacatttctgtcttccctccatataatcaactcccagaaaatcaactccaccatgagttatttaagctgtgactgaccattcactcatctcaaaactctgatggagcatgaggtactacaggccagccctctgctaggcactggtatccagaagtaagatgaacaaagctcttggtccctaagggtgcacagcctcttgtagttgtyctcccctccttctgaactctctgccttcccttcccagcagggtgggcaggagtgggatatgacaagccccacatcctggtagtttagtcctagagttatcaccctggctaaaagctgagccgtagaaaagctggagttactctctaaaaggagatacttgcttatctatgagttttatttatctctgtcctccacaaatcccccacccttgctgtgaccacagggaactgagatttggctgtaattgctgctcaatcacacaccattaacttcccacttaagctcacttataccaagtacatattttatcctctcacccacgcagccaacacactagagcccacaaatcatctgtgtgcactttggaaatttttcaattatttttaatcagctcaaaatggtctgctcccaacgcaagggctgaccagactcaccaggtaccaggagctcaaggcacccaggaagtaaggtacataacagattccttacctgccacgacaatatattcctagccatctttctttcatggggtgcatcagcaccaggagcaggcttcaagctatcttttaaatggctgaagaggatgtcaaagtagatgttgaatatagcactgaggggagcagcagtattcaatttgggactttttctatttagggatggacttttacctccactgggcattgtcactcaccaagctccctttggtgtgtgtctcaccacaacacagccaggaaaccgcaaaaagggagacagatggagggaaaataaacagtctgtgctttctccaagctaaaattacctgttgcttatctaataataataatcatctgctgcaatttttccaaccctcagataaatcagatttaaaatgttgatgtgtcacaacatccgattagccactgagacataaattacagagcagagctaagcaaggtaggagagaaatgactaggatgaacaatggtaccccagaaaaggctgagtaaacaggtgtttttaagaaaacccttttcttatgtagggccacatcacagtctcatcaatgatggttccctgctgaagcccctggaaacctggtttcttctcccaacagaggaatttgaagctataagggcataggcataaaatgggaactgatccctgaacatctggtacaatgtttggcccataatagaccctctgcaaatatttatttgttgggtgggtggctggctggctggctgactggctggctggatggatggatggttggttgattgaattacatggcttatgatatactcaattcatgcaataatgagcagtgatacttttcagttttttttttttttttccatttccttatacctctattctgggtactctttatgtctcaccctctacgtagatgaatttccccttcctaacatgtcagtccctaccttgcttaaaagcctgacatgatctggcccctgccaatctttctaggctcacttcctatccttccccataccctcagctccaagtacactgaagtctttgcatgagcatgcctggttctcacttccccatgtccgtgtatgtaaagattttctgtatgaaatgcttttccttgcctttcatcccttttcacactctatcaccagaacgctttgttaacttctacccatcctctcagactcatgacttagattctcaggtggtggctggtcttcctccaacatcattacaccaatgactcaatcatagcactcttcacactatatgagaacagtttgttcacttacctgtcttcctctctagactgggctgtccttgagaatagggactctggctttgctctctgaatttgcagctgtcattgtgtttggctcatggtagatactcagtaactatgaatgaataagtgaatgtcacggggagatgtttgtcctgcaagagtgatgcccagtcattaatattttcttttctcctccaggtttctgattcatcaaacccatttcttaatcgaatgctcaacagagatacwatcacaagaataacatataaaagtaagtttggttcaatttcctccacagcaactattctataaaggttagacctgcctgaaggcgggaagccagaactgatgatctccatgggcccttttcagtttcatgatcctgcagttctgtagaaagtcactctggagattagggtttggctaagaagcagctcatttcaagcagaagtccctagggtgcctttgtcatccatgcctaaggtgataatgattatgactatggtggtcatcgttatcccatagattggtaatgagccaggggactctgctggctgacacgctccaccgtgtcagctggtcacagttggggctttgccaattaygggattgagaaagccctcatcaggtactatggatccaatcgcaacatttacagaagccctcggctagaccatttctctgtgtgtggctgggtctcctttccaggcagagacaggatagcatctctcttcagccacatgtgtggcccatggatgtagaggactctgtccagtttccttgggtttccagagtgttttatccccagactcattatgcagaaaagagagaacagtgcaaagttgaaggaggaaggaaaaagatgctgctgtcatctccagcaatcccagaaggtgcaggatttgggaaaagttgggtgagacagcacacacccatagatgaaagaaataatatgaggaaaaaagattgtctttacctaattaggagcgagtaggatamtgggattcaagtcctggctttgtccttcatcaaggagtttcctcactttgactctgtcattcatcttataaagtaaaaaagttgaacttcaagtttctaaagtccttctaggtctgggattctgaatcaagcaataggtaaataatgattctcacaaaagtgaaaaacagttggcaaacatccaagcacccacatccccttggcatgcccttcaccaagccaggagctcagctgtgtctgctgcttctctctccaatggtgatgtgaagaaaaaaaaatgaatgtgtacagctctcacattggactgccaagggagagtatggagaatgcttcactcagccgtttactcacttattcgacaaacatttcctgcatgcctgccccatgacaggcaccaagcgaagctccagggatgtaaagatggcccagacagcagccctacaactaccacgtgctcactgccaagtccctcccatctgcagaggctgggagactggtagggctgaggaatgaacctggagaatcccgctccacctagagagacattgcccagaagaatgaattaggttgtctccaagcatattctgccttttctcattagtattcttatggagtcctctctaagcacacacttagattgctcagctaagggagatatttctgtcttgtgtgtaaatagcacatttataactgcccataaaagattattattcttttaacttttttgatgaaaaaagcatgaaaattaaataaaatgttttcaaataatcttggatttgcaatttagagaccgtgaaaatgcatgaaatcacacattaagccccaacacacagtctaacagattaccagttgcagagtcaatcattagagggactttcctccccaccccaccacccatcccccagcactggtctgattaatattaagtgatgtggcttgtgccaccaagggaggagcaagagaggggagggagaggaaggggaggcagggaagraggaaaagacagatggaagggaggaaaggaagaaagggagggagggaaggaaaagcattccaagtgtggggagccacatgcacaaaacctggagagcactgaaggccggtgaagagttcagagggaggaactctgtcttcatcagctcttcgtctcagtgcctaagacgaggcacgcccaataagcattggtgatggcctgggtgaatagaaggatgaatggcctctttcaggagctgtgacggggcagagggagtggcaagaaagatgttctggagccrgatcttgagccatgttaaggtgtttatgcagaaggcaggcagacatttaaacacccttttcacctctgaagacacattcctagaaatgcaaatagaagacagcaggagcaccctctccttctgacccccatactctacacctctcagggcccagggaaaagaaaggggagccaaagcaagataaagagatcctggcctgcatggggaaagatagctgatttaggccccctaataacaggaattttgtgctcctataattcagcagggagtaattgaggtgtcctctgtagtgacctttgtcacatacctgaagggagcagcactgcaggaataatgatggccgattcatgagaatgaccctgacactgctttgcccaggacactgcggcagaaatgaattgatttgcgcagcagaaaaccacagctctcttttgtccctagggcagccagaaggttagcccagtggcaggcaggggagtctggagtaggagtcattcactagaacacagccagtgggtgggaaacataagactggaagtccctcccraggctttccaacaggcagcaggttaggccagcactggcccataaattcaggttaagatgaagamaactcagggggccctatcagggtatcctgcttctgtccttctaaatgttcgrgagacagaaatcaaccccccaccccaccatttctaccatgctactgagggacacctaacctccacccctgcccattctactgttgctacccagaactgcaccccagcatagcttcaatttgctctgctcatttagatgcagtatccactctgcaacgtgctgagccccaggaatatggagatgatgcttactgagcactttccacacaccaaggtctatgctttacatacaggctccttacctagtgctcacgaagtccttcagagcggtatgattgccatccccagtttacagatgggaaaaatcaaggcttcaagaggtgaagtcatttgaccaatgacacacatttaatggctgtatcagtcagcaacttctgcgtaataaacaagcattcaatgataagcattgatttcttattgctccctccttgggttggtaggggtggctctgcttccagctataggtctgcaagtgagctgaagcagctcagctccacgtgactctcattgttctaggatcaagatgacatccagggcaagtagttctcatggtagagggaagaaataagtgatgtgacttaaggcctagtcatgaaactcacacactcactctgtccacttccacaagccaaagcaagccatatggccaagctcaacatgaaaatcctgccaaggagatgaagatgaggaagaagtgaacatttcctgaaaaatattcttccatagtagaagagcaagtatccaaatacaggtcttcctgggtactgtttcctctgcttttccttcctatcatgctttctscctaaggaggaaggaaagcttagctccagggtcttaaaactaattgcartgaagatgttttcacattccatgaaacttgtcagcatgtttttctcttaattccaactttggttcagtttgaagaagcatctttttgctatttgcatgtgcctccacttgaaagggacatatactaaccacagaactgatgggaactttggcagttcaagtacatcctgacctaagctctctccaactcctgcctggccctgaacatggtacctccagtggaaatcagtcattcagagggacacagtgacattgccattactgacatatatagtcaccagagaaggcacagagattaattctagagggggtcagtcttctgaaaatctgccccttgaaggtcattgtaacaaaaagtcaatctaggaatttaagcagagtgacatcatctgttgacaaaaggatcgcctcattgcttggttgagaatagactacaaggggcagagtccacaatagaagaggattgcagcaacccaaataatgagacgatggcactgaccatgaccgggctgatggggattggcagggagatggtgagaaataattggatatattttaaagaaaaagccaagaggccgggcacagtggctcacacctgtaatcccagcactttgggaggctgaggcaggtggatcacgaggtcaggagttcaagaccagcctgaccaacatggtgagaccccatctccactaaaaatacaaaaattagctgggattgtggcgcgcgcctgtaattccagctacttgggaggctgaggcaggagaatcacttgaacccgggaggcggaggtggcagtgagctgagatcgtaccattgcactccagcctgggcaacaaagcaagattctgtcaaaaaaaaaaaaaaaaaagccaagaaatgtactgatatatctgataatatatctgatgttttatgtgagagaaagaggggagtgagggatgactgtaagacttttagcctgagcaactggaaagaagacattttcatccactgagatggggagactgtggatgaagcatatccgtgggtgggaaggaaatcagaaattttgaacatgttcagcttgagatgtttataaggtacccaagaagaggtgtggagtaggcagttggatatatgagtctggatttcaggagggagaactgaagatataaatgtggaagacgttggcatccagatggcgtttaaacgttggtgaaatcctgagagtaagaataaatagagaagagaggcgggacatgtcctcacttttgaaagagcaactcaaatctccatgacttaggattgaaaatcacttctaaagatatctttaaaatcccaccctggaagaggctcccgtgtggctgcctcatcagcaaactgaggtggtgcagggagctgctgcacacatggaggcagcggggtgaaatcacaacatggcagctggaagagacacagtccatttgcccggtttgtaggattgggcacagaatgaatgaccaggaaaaaaaaaagggggggaactgtgcaaaatcaytcttttgagccagttacaaaaaaaatcaatgccaggaaattcatacaaggaggaaagagggagaatctcgccaagaggattgggaattttggaggctaaatgccatgctggtaaaggcaccacacccatgggaggcagtgtgttctagtgaagagagatctgggctcctatcctggctctaccacttccttttgttgcctgactttaagcaagcttctaaacacctccccgatctgtaagaggaagatattaatgctgacgttgagatggttggcatgagaatcaaacaaggkaatgagtcaaatgcctgaacaatgagtggtataaactaggtgtaaaatgaacgtgtatttctaagttgtcttaaggtacctggctatcaaatccagcttccctcaggggaggaggcaggttgctatgatgccaaataaaaattatgttgaaggtaaatgcaatacaggacacagagtcaacagaatttgcttgttttaaatgaaayaccgctcctgtgcttgaatccatgcagtggatggtgatgatttaatgagattctactactttactttccttgcaagcttagatttcatatgtctgagtgaaacttataaaacactctaactgggactgacaatgaaaaaaactagcctgaactaaattcgggctgaatttagaaagtcttctaaagaaaacccattttattaaagtcaaattccccttcaacagactgggggttaagactaaaatcatgacattgaaaaatagattttccgaatggattttctggaggagatattggtaatttacttgaagtattttaattttttaacgtagtgtattggaataaggytaatatccctccatttttcttgtgttaattaattggcattaattaacagaatcccaattaaataaaargtagtattcttattttattatctacccaatttcattaagccagcattattttttaaaaagagattttatgctgttttcaagtggctaaactagtgaccaatgaagtrcaaagaggcttcttaagtgggtaagagggaacagttattagaacactgcatataaaacactttcctctaacatcttaggacagtattattttggtagcttcattctccttcagtgtcgcatgcccccattcatttagtccaataagaatccaaacgatcacaaatttcaaatttaaaaaggtatggtggctgggcgtgttgactcacacttataatcccagcactttgggaggctgagatgggcagatcacctgaagtcaggagttcaagacgagcctggccaccatggtgaaaccctgtctgtaccaaaaatacaaaaattagctgggcatggtggtgggcacctataatcccagctactcgggaggctgaggcaggacaatcactgaaacttgggaggyggaggttacagtgagccaagatcatgccactgcactccagcctgggcgacagagcaagactccatctcaaataaaaaataaggaaaaaaaaagatatggctattgtcctaatgtatttcctctaaggaaataaaaccacaccactgaaggcatctggagragagctttcagattcagcgctttgacacgtggcacaagccctttaaagcatctttttcagtcttacctgtttataactttgctttacttcccccaacccccagatcttctattcagctaaaagatgcatgtgtaggcaaggacagatcaacttggaactgccttatacttctcagttctttgggaagtgttttatgcgccgctcctcagagggacgtggtgttaaatgtgacgaaatatcaccaaggagtttaagcatattgctcctggtgcctttctctatgcttaattgaacttgtactttcatttcaaaggaacggctttggaaatgctttcacagaatgcaaaacgcagcacaccactttccatgttgcaatctaagtagttactcacgtcagcaaggaacagaacaggagcagcttacctccacgaatccaattctcagaggtcccttttatcatttattgtttgtgtaaaacaaaatatcatattacttcattctttagtaattgccttttttcatttcagttgaatttgcctcagattacaagaggaaatgtcattctatatgagaaaattgccaaatagttccatattgatcaggaacaagtccagtattgatctctgaaactrccgtgccttgttctcattggaatagttctcttcaaatgggaacttcataagcaggaagccgggcaatattaaatctcatcagtggtccacatgagtaagcacaatgcatttaacagaggctgcctgttaaatgcagactgaaaaaaaaagttcagactgagggaaagtttcccccsactcccccaagtggtcctaggcattttatcatagtgtasgtctcctacaaaaagaaaaagtcagcttgggagttgtaaccaygactaagaactcagtataagataaatcacaggttcatcaagaacatgtcaaaaaaccaaaggttcagctgtcaacttctgcagtcatttgaaataataaaattgggtgataaamtacacacatatattctacacttattgattattcaagatccaaggggtcctcctttactataaagatacagccaacacatacaaaattacaacactstcatataaaaatttgacctacctaagataaatttggctaacaagcttgtttatgttgaaagatggttttggatccatagaatgtttaatacctgaagatgcaattttccaggactgtttggtatcctcaagtaagaggttacattcttttccatgaaggaagaatgagttgctggcaaagctaccactagaactcagacttgaattaagactcttgacttgacatctaggatttgccctttataagctattttctcatatgacaggtaagtaggtgatagagatatgagagagagagagaagagagagaggagagagagagagagagagaaagaggggataggtagagaaacctctctgcaaaactattcatgaaactttatttgaacatctgtcctgacttccaccaataaacatccttaaagcaagcagagacatgcatgaacactcccccactggcctctgagcttcaccccaaatttgcatctttgttcacaaacaactctgacctcctctagatctttgccatccttactcatgaatagagccatggaagtttagagaggagaatcgcccttctggtatattggtcctcagtctactttctgtctataatgcccagacgataacgctgacaagaaccaaacaatggttttctgctggatgctgcaaggacaagatagtttgtgactaaaaactagttcctggcctagttagccctgaaaacaccccagtgtgccttgacattagggctgaaaacttctgttttactcatgttcttttcttgggtccctctgcttctgtcctatcaaacatacaaagcaagcttcaacagagagaaaagaagatgcagaaagttagccagtggctttcaaatcccaatacctaaaagatagacactgatttaatggcagcctctgaggcagcatgatgagtcatgaaaacaaacattacacgttaaatgcgcactgactcagcaatgtaaatatgaaggtagaggagtctttggtatggaaacatggtaatagcatatggagatggaaacagggcaggcaatctcaccctgatgtcttagggtgtgagacataggggggagatggtaggcagcatgtatttaagctaaggatgctgactggagcctcagagatgcttcccctcatctgataaatgatgtcgtctcttcctcccttgcttttgcccaacactgccagcaggtagagctgctgagcagaaaccatttcatttgttcattcgagcagtgtttactaaacacccagtatgtggtggactcatgctggcatttgggggcttagagatacaagatgcaaacccttcccctgaaggctcacagcttagcagggacagtcaaataggcaaataatgattgacaagctaattcagtaaatacagcaaaaaaggagggcactggcccagctggggaagccagggagtccttgaggagaggagcagtagttattccagggcagggtaggaggatgtgacaaacctggaccacaccttatgctaggtgcttgaaaagcatgatcctgtttattcctcaaacaaccccgtgagcaaagtactccaaccatctgcttattgcaaatgtagaaactgaggctcagagggttacctgtgggtccaaggacacacggagagtgagcagcaaagtcagcactccaactgcgatgtgagtctaaaactcacactctccactctgggtctttccaagttctgctgtgtgaggatataaaaagggcaaaaggtagagtataagtattaacaagatttgcagaaggaacacagtggggagtgaaaatgtcaggagagcagaagctgcctatgtcctctgatgactgttgcatcttggagagggagtggacaaagagggatctcctggcaggacctcagtggatggagtctggggtatcagcactacggtgttttggaaacctgctgtgtgtgataaatccctgagcataacctttgactcttgctcctagcctacactatacctcggcccccaatcttttccacaaatatagctgcagcacaaaggctggttacagtctcaaagaaacaaaacatgttccttttctttactccagtcatgcctggaatgcctctctttctacttcccccttcactcctccccaccgccccgaataaaataaaatgcaataataacagcatgctagagtacccaatgtgttcctcgtgcaagcttggttaaacaaatcacattgacctttaacaaaaatgtgctgaatgcttccttctcttattcaatatgttaatcttcaggccaaaccaccatcagagcaagcctcattaagtgcaaatgtgatcatgctactccttggcttcaatcccttcggtggttccgcattgcctccggatgaagtccaaactcccagtagtgctgggaagaccttctggtgtggyctgtgctgaccccaccagccacatttctcacagcagccctccctccccttccatctccacatcgccctgcacctcacactccatctgtccccaagtacayaccactccttccttgactctttttctagcattgctctgtctacagtggccttgacrccctacccgattcccagctacaaactgatcacctcctgctgttaaagatgcagttcaagtcaactcctcgattcattccttcctgagtaccccgcaccctcgccccagacagaactcacagcctctctctgggcccaatgcagatttatgtcattgtctctgtcatgccttctgcattcacttaattatttcctactcatctatacctggcttagtgcctgacacatcttagggacttaagaggcagtcagagacaaatgctgatatccaatgttaacttattgggttggcccctgatgtaacccccaaggtccctcacgtcgtgtgtgccctgggcactgtggctttgttatggaagcatctgcccaaacaggccatagtgcagacccaggctggccatattccaatcactgtgtctctctcgagcatgtcctcgttccttggtgttttgacggaaaggtagaaacatttaaatgaaaagtgaaagaaagtccttcctcctagggttggtctccaaatccagcttggtgaagctatcttcctcagagactttggtggatggaaccctggaggggttcccttaccccatcaagggagtaggaggccaggaagggcagctttgaatggagtaggcaaattgtgattgtatttatatcattccaaacgattggctccattgatttgttcacaatttaattgacaaagcaacactgaaattcaagttcccttggcaaaggtaactctttcttattggagaaggctgaacgagcaatttctagaggaagaaatggaggagagggcatctttgccaaggaaaataaattagcagcattaatcagtaggtaagtacaggcaggtcaaggtgcacttattactgtgacattatagcctacttatttttattttgccatttgttatctatctctccaactagaataaggtcaaggactgcatctatcttgttaattgctctgtccccagagcttaacactgtgcctagcacaaagaggttctagtgaataatcgttgaatgaaaaaatgaccttggtctggaggtcggaagagctgagttctaatttccactttgcagtcaccagctagccctgtgaccttgggcagcccactttgcctccctgatctttagtttcttgtcagtggaggatgttactatctgcctgactcattttattgagtcaatgtgaggttccagccatatgtgaaagtcttcctttaccatatatgtgcacaatactaaactgaagaggttccctcaacccctgaagaatgagtactttcccactgggagttagacacatggacgagagaacatgtgtgcatccatggggctggagagtcagtctcatccctcggccagccaggctttgggaccctgccatgtgttctccaggtctcctggactggccacagtgatgggtgctcatggtatgcctggggatgtsatacctctagagatatagatctggaatcactgggatgcagaaggcaagtgaagccatggatgtagatgagctactctcagatgagaggatagagtaagaaaagaagggagccttggactgatctttggggaattgcatcattgagagaagcaggtagaagatcaggagacagcaacaaaacctgagagagaatggccagaaaaatgggaatactaagtatggtatttttgaagccagcagaagagaacaatcacgtgctaaaagaaaggaagaaggatcatgaagaggggagaagaggagagatacattgcaattaactgatattttaaaactccaatacacacaattttatcaaaaatacaaccaatacattgactaaaaaaattaacaggaaacacaccaaaatgctaatagtaacagttttagatgactgaaattgttttttcttttttccatatagtctgtgatgtacttatgtcatttttaccaytgaattactrtatttagtaatagaagatatatgggtatgaatacctcaaattggtgtaagagaaaaggctatctgcatagacctgagagagagaaaaatacacacacacacacacacacacacacacacacacacacacacamaataatcagttgttgagcttaaccatagaatctcatggtaggatttggcctgatttacttttctatccaaaaatattttcttattgttgttttaagtgagaatggtcaccaggtgaatttcaacaggtctagaagctttaattgtccatctcatgatacctgtaatgcctaggagtccagatctcagggactagaatcaaggactcctcaaacaatccctgtggtagaacgcattgcttacagctcaccaatgctcagggccccatcctgtggaaggaatgtgcttcctcgcatccccaacatcagccttaaccatgtgacttctttggctaccaaaacatgagcacaagtgatgtgtgccacttctgggatggaagttttaagaaccaacacacattcgccatgctttcgcttctgtcactgtgatccgcacaggtccaggtgtttactgctctaagagtctaggtcccaaagcatggacaatgacatggagggaagcctcagccaacctggaatgatcatgtgtgtgagcaagaaatacattcttattgcttaaaacaaccsagatctgggggacaactgcttgttactgcagcctgttctgacagatagagtcttctggaattccaaaagaaatacatatatatctgtgtgtgtatatatgtatgtatatgtatatgtatatgtatgtatgtatgtatgtatgtcagcaataccatccctttctcaagaaacctaatttttaagtcttctttccttctctagatgatgcatatttactacaggggcttaatatagaggaactatatccagagacctctagtttcatcacttaygatgggtcgatgactatcccaccctgctatgagacagcaagttggatcataatgaacaaacctgtctatataaccaggatgcaggtgagtttctmtctggtcatttagctaatggagaagaatgatgttaaaaaaaaatcactgaaatgtggagtgcctattataatagtttactaggaccactataacaaagtcccacaaactgggtagtttaaactaacacaaacttatcgcctcacagttctggagactagaagtccaagatcaaggtgtcagcagcgttgcttccttcagcggaatgtgaggaagaatctgttccatgcctctcccctagcttctagtggtttgctgacaatctttgacgtgctttggcatttaaaagcaccaccccaagctctacctccatctttttttttttcttttttgagatggagtctcgctcttgtcacccaggctggagtgcagtggcgtgatcttggctcactgcaacttccacctcctgggttcaagcgattcttgtgcctcagcctcctgagtagctgggattacagacacgtgccaccacgcccggctaatttttatacttttagtagagatggggtttcatcatgttggccaggctggtcttgaactcctgacctcaggtaatccatttgcctcgacctcccaaagtgctgggattacaggcgtgagccaccacacccagcctctacctccatctttataaggtgttctccctgtgtctgaggctctgtgtccaaatttcccctttttataaaggcaccttctgtattccattaaagcctaaccccaataagcttgtcttagctcattccatctgcaatgactatttccaaataaggtcacattctgagcaactaggggttaccagtaccttcagcttatgaatttcaggggtacacgattcaacccatatgcctgggtttaaagagccagcatccaaaaggcttagcctgagctaattatagaagcatctcaactgtctcagtgggaaaagatagccattaattcccagagtgtattctacaactacagtgttcagaaagcaagcaagcaaaatggaagatgtcattatgcatttgaaaaagttgggttttaaaaagttaaatagattccattgttgaaggatttctggggtccttcttaaatgctaatatatgtgtcagtcttcaagaggaagtggtatgatatgtagtattttgcacacatatttgaatgtgcagtgttttttttggatcatctcacagagttagtactcatcagaactggatgggaggcagatgggtcctcctgtgtgagcttggctacacggcttattgtgctcttcaggcctgtcacccacctctatgaaatgaacactcctcttctttattgagagggggataaattacatgagtttgctccagctctgacattctaygactgtgggagtctataacaaattaaaggagagatgagcaaaggaagcagaagccaatatccttgacgggatatgtgttcccacctgaccaccatttgaacaatttgaagttccttaacctatctgtattgawtgggacccactgggtgacaggcaacagtaactccccacttaagcttagaaaaagcatttatttgagagctacgagggcatcttagagaatttaaaatcagaaattgacatcagaaattcactgaaatgggaaccccagaagtgctttctctctgttgtcctcttctcaccacacattcacttcattcttctctcctgctagagaccgtcttcttttgcctcacagtcctgtggcagaacatggctgcaaacagtccagccacctggccctcatagtctcacagaaaagaaaccaaactggtccagcttagtttagctctgacccatggaccaatcactatgatccacgtaataccatgtgggagtcatggaattattgaaccaaagagtatcaaagaaagaaagaaccttagagaaacctaaccagatttgctccttttttggatgctgcatttgagggtgagagagcgcaagtgacttgttcagaggcatacacaagctagtaagctagaagaaaggctggcttcatgtgkggaggtataatgggccttcagctcaactgaacccatggaaaaaagggactctgtggggcttatacagccctttcctcatacagccaataccacctagcttggccagagtctctgtggtcttatttcttccctagtgcatttaagaggayggttggatctcacggccacttctctctcctcagatgcattccttgcgcctgctcagccagaaccagccatctcagatctttctgagcatgagtgacaayttcaggcctgtccagccactcaacaaccgctgcatccgcaccaatatcaacttcagtttacaggggaaggactgtccaaacaaccgagcccagaagcttcagtatagaggtgggtttggtggctcagagagtggaggatctaggctagagctcagtctttctgcttagacctgttcttaaaggcctggcattatcttccattataggaatgatgactgtaaatgacaatagcyatcacactccatttgcatggtgatgaaggtctaaagttttgatatatgtgatacagatacctgtatgaatgcatctaggtaggttggtaggtaggtaagtaagtggatggatggatggatggacggtaggtagatggcaaggtgtagaggtttgatatatgtgagatatatatatatgtaacctttaaacacatatatcaaacctttaaaacccctgtagatcaggcaagacagctttttattgccatttttcaaaagagcccagaaaggctgatgttcccaaggttatctgttagaacaggacagtgaaaagcattagagcttttaagtatatggaagaaagacctgctttcccctagaagatgaacaaatactctaaagggcaggccattagaatccaatggggtaatttgtgagtgtatctttgcccagtgctatgtccctagaaatggttattattcccactaaaggggacatttaagttgacatctgcctcctgtaactctgtggtgcacacccagccctctctctcttcccttctgcttactactaaacatctgttaatcattgtggtaaacactcagtgtggaaagaaagatggaggaaggatggggtcttggagagccctggactggaaatcaggacacccaagttctgggcctagttctaacaagctgtgcaaacccagccacattgtttaccccctagacctggcttcttcgtgacagttcctatgccatctacttcacagtttgttaaaggaagcaaacaagagcctggatagggaagccctttgtagcaataacatgctccccaaataggagggctgtggttattaccagacagcttttagaagcagcctccaccactactccttgatcctccacttcattcctcctacttcccccwtgttcccttcttttttctctctcagatacacttgcatgcccaaactacatattttccacacccttccagccggaactaccagaaaagtaaatacctaactcattcattgcttcttctctttagtcaaaacccctgtattgtgttcctaccatgtgtcagttagctgggtgatgggtgacagataagacacctatccaaacagagcatatggtctacaacaggagtctacacactttttctataaaggacagagagtaaatatgttaagttttgaagccataaaatctctatggcactctgacattgtagtatgaaatcagccattgataatatctaaatgaatgggtatggctgtgttccaataaaactttatttataaaaacaggtattgtgctggattagatctgtggactgttgtttttccatccctagcctagagcagtgtcatccactagaactttctgtggtaatgggaatgttttcatgataggttgatgactatcctgcactgcccaatacagcagctactagccatatgtggctattgaacattggatgggtgactagtacaatgatgcaactaattttttattttaattaatttaaattcatagtagccacatatggcagctagtggccaccatattggtcagtataggcctagaaggtcatggagaattggaagggagtagttggaatgcatataagtaagcaggcatttacaaaacagtcccttcccctctggaggaattctctaaaactgtgtgcaaattaattgagtatgcctcgttttatgttgtatgtgtgattttttttttctttctctctctttgcagtaaatgaatggctcctcaagtagggaacaaagccmagaagaatcccacctcagtgaaatgctacaactgtgaattgacgtaacckagaatgtcccccttcttgcttctctctccttctttcccccaagcctcattcattcttgggattggccctttcttcatgaaaagtgtctgcaaaaccatggcagaggaatacatctctcacacatactcacaaacacacacacaagcacttgcacatacatacaaacacatgcaaacatacctacacacacacacwctcttacaacctccatcatgggaagtcaagtttcagaaacaaaagtctcattcataagaggtcttagaagaaaataaccagttaacctgatttcaattttgataccgttttcctgaactaataaatctacccaatgagacttttcagcytttgtacatacaaaattcttccaaaagagagaggagaaaatacagctctgatggcatcaaacggactttgcatcaagtaatttcagatagtgtcctaggatcctttgagggtgctggtagcaggtgagcaggacaaagttgaccaaggacacttatttctagattatgattcttctgtttactcaacaatttacaaagaaaaaaaggacagacattgaagagctacacattgtatatatatcaccacagactataaggaaatggaattatttccctctttgtcacatatctgtagtaggatttgccaagatcagaaatgatccatttgctgtttcttgttttccaaaggtcatacattgtgtttggttattgttaccagctcaataaatgtgtttaacgagttaatttcatttttctggctttggtctgttctccttccttacaggctaagccctggctccatgcaactgcattctttgatttcacttgttccttcatctacatgttttgttcatttgcagccagtttttactgagtttgtggcaatcaggaatgcatttgctaagcaagtatgactttaattccactccatggctcaatcattcacatgaggtgagcttcagcctgagatagcaggcgacagacttcttgcgtttcaaaactgccatgcccccctgtgatgctcccgtgaaggaatgcactttgccttgtaagttcctgggaaaggggtatgttttctctccaggtgcagccagatctcacaaagtacaaaacgaatgcctttcttttcttgtttataatggtcactcactgtgtttggttactgtcaagaaatcaataaatgtgtttaacaagttacccagtacccatgtctgactttattgagaaagaggatgctccctgctgaagtctctgagtcctgctgggtgcaggagcaattgcatacggggctggcagggcatccagaacagcctgtctagccattcccagagccaggtaattaataccctgttgagaaaacatataggcttagctcctggaagagaacacttggatgtttgttcagtggccaaattaaaaataactttcatctctcctttctgtcacactctcctggaagggggagagcacaggcaaggagagtctgtgcaaatgagaacattcccaagcatatgaaaaacttcagcctagtgactagatggattgacaatgaaaaattcaaaacacccagttatttcatattcaaaataatatacttaactggattttatcttttactttactttttgcatcaatgtcagacacacggcagccttagctatgatggcatctagacctatttctgagcaaccttatttttccagagaaccaaatattcacaaaggtttagggtaagcaggtggcaatctttacatggcttgctgctgcttctgaggtagaatcttccttaacctgcaatggcaggcagcgatatagtataacagctgaagaatatggatggtaaatcaactttactctgcctcttgcctgctgcgtgaccctaggcaagttgctttacttctctatctgtacattggggaggttaataattgcctccatgagttatgaggcttaaacactatgtagttacttaaagcagcctgcacaatacctgcaatgacctttctataaatggtaccaatagtagagcatttgtacgacctgcctattaaaagtttatctgagtcataccatgccttcctttacagggtggtggtagcatcaatcacaacaaggacaccagagtgacagcaaacgaaagcaatagatacccagcagactgcacatagataaatgcctacgatgtgttgaggaagagaaggagaagcatgagcaaggaaggcaggcaggcaactgggtttctaggccccaccccatcacagcatcctctctgacactgggcaagtcaactcccctccctggggctgagtccttatcgacaaatgatttggacaagatgacctcccctggcctttccactcttaattccccaactgtgcctctcattcagttctttagtccagtgagaacaaagaaaaacccagtctctcacccctagggcccctaggcataggcagactttcaccttgaccaaacaggactcaaaatggggcaaactggctcctgtctctgactttctgggccagtcctaaatgcccctttctccatactcactaggtttcccaaactagaaaaagaaaacatagtcactttgccctcacaatatgtaggagtaataaaaagactagctagattagtacctctcaaaaaaaaaaaaaaggtggtagtttttaaagtaccaaagagcccctggacttcctgagcacccatgggctgtaaaatctattgatgtattcttgttctttggtgtcttcatctaggactttggtctcatctgggtcttgatctcttcaacatcactaatcatcagggaaatgcaaatcaaaactacaatgagataccacctcatacctgttgaagacatcaaggaacaaaaatacattaatcaattttgcagtccatgggtgctcaggaagttccaggggagtggtgtctctgtgctccacagtgtgtgccgatcggccagctttgcctgttggagcccaggctgacaggggcaccccttcccttttggagaagtagtctacaacctgcaaggaaacacatgctaagcctcagttccctcctctgcgaaatgggggagggaggtaaatatacacccaagagagatctggacaaattgaatgaaaaaaagaacacattgaggtgagtggatcacctgaggtcagaagtttgagaacagcctggtcagtatggtgaaaccgtgtctccactaaaaatacaaaaattagccgggcatggtggcacatgcctgtaatcccaattactcgggaggctgtggcaggagaatcacttgaacccagaaggtggaggttgccgtgagccaagatccatcactccactgcactccagcctgagtgacagactaagactctgtctcaaaaaaaaaaaaatcatgtggaaatccacagccctagccccttcttggggacacattttatggtttcccagaccatttagagccttgttccaatctccctctgtagcagttaagtttccatggtgacatcaggacaaccacaactcactgcactaaatgtgtctggaatgtggtacaagacagtgagagaatcacatggaatctggacaggaaagcagtccttgaccacagcccataacacacacatcaggccaaagaagatgattgacaagggtcaattagcatatgcccatacccccagggtggacccgtcctgctggaatccagaacacctgcagttcataagagtatctcaattttcctgttccagaaatcctaaaagtaggacccctaggagcagaaacttactgtaatattattcaccaactggcacaactgaacataaggaaagatctgccaagactccagatgaaaaaaacatactattattgataaggtctgccataggttgcatattttctgtggtccaggcgctgtgccaagcagtttacaaatatcatctcattttacccacacagtgacccacaaagtaatcaccactgctgtccctgggttgtaaatgcagaaattgacttcttatagaccaggtgatagcctcaggatcacatagctcataggtggaaatgccagactcaactcttctaagccagtggttctcaaagcatggccccagccaacagcatcacttaggagctggttagatatgcacatttttagatcccactgcagaccgattgacactcagagggtgagccccagccatctgttttaacaagccccctagatgattctgatgcacactcaacgtgagaatcaccgtaaatcaaatattcatccctactacttcctactctagaggttcccaaactttactacatattagaacctctttagcataatgtcctccaagttcacccacgttgtggcaaatgtcaagatttccttctttttaaggctaatattccattgtacgtctatgccacattttctttacctgttcatctgtcagtgaacaatttagcttttatccatgtctttttattattattattatactttaagttttagggtacatgtgcacaatgtacaagttagttacatatgtatacatgtgccatgctggtgtgctgcacccattaactcgtcatttagcattaggtatatctcctaatgctatccctcccacctccccccaccccacaacagtccccagagtgtgatgctccccttcctgtgtccatgtgttctcattgttcaattcccacctatgagtgagaacatgaggtgtttggttttttgttcttgcgatagtttactgagaatgatgatttccaatttcatccatgtccctacaaaggacatgaactcatcattttttatggctgcatattattccatggtgtatatgtgccacattttcttaatccagtctatcattgttggacatttgggttggttccaagtctttgctattgtgaatagcgctgcaataaacatacgtgtgcatgtgtctttatagcagcatgatttatagtcctttgggtatatacccagtaatgggatggctgggtcaaatggtatttctagttctagatccctgaggaatcgccacactgacttccacaatgcttgaactagtttacagtcccaccaacagtgtaaaagtgttcctatttctccacatcctctccagcacctgttgtttcctgtctttttgatgattgccattctaactggtgtgagatggtatctcattgtggttttgatttgcatttctctgatggccagtgatggtgagcattttttcatgtgttttctggctgcataaatgtcttcttttgagaggtgtgtgttcatgtccttcgcccactttttcatagggttgtttgttttcttgtaaatttgtttgagttcattgtagattctggatattagccctttgtcagatgagtaggttgcgaaaattttctcccattttgtgggttgcctgttcactccgatggtagtttcttttgctgtgcagaagctctttagtttcattagatcccatttgtcaattttggcttttgttgccattgcttttggtgttttagacatgaagtccttgtccatgcctatgtcctgaatggtaatgcctaggttttcttctagggtttttatggttttaggtctaacgtttaagtctttaatccatcttgaattaatttttgtataaggtgtaaggaagggatccagtttcagctttctccatatggctagccagttttcccagcaccatttattaaacagggaatcctttccccattgcttgtttttctcaggtttgtcaaagatcagatagttgtagatatgcggcattatttctgagggctctgttctgttccattgatctactgttttgataccagtaccatgctgttttggttactgtagccttgtagcatagtttgaagtcaggtagcatgatgcttccagctttgttcttttggcttaggattgacttggcgatgtgggctcttttttggtgccatatgaactttaaagtagttttttccaattctgtgaagaaagtcattggtagcttgatggggatgacattgaatctataaattaccttgggcagtatggccattttcacgatattgattcttcctacccatgagcatggaatgttcttcaatttctttgtatcctcttttatttcattgagcagtggtttatagttctccttgaagaggtccttcacatcccttgtaagttggattcctaggtattttattctctttgaagcaattgtgaatgggagttcactcatgatttggctctctgtttgtctgttgttggtgtataagaatgcttgtgatgtttgtacattgattttgtatcctgagactttgctgaagttgcttatcagcttaaggagattttgggctgagacaatggggttttctagatatacaatcatgtcatctgcaaacagggacaatttgacttcctcttttcctaattgaataccctttatttccttctcctgcctaattgccctggccagaacttccaacactatgttgaataggagtggtgagagagggcatccctgtccttgtgccagttttccaaagggaatgcctccagtttttgcccattcagtatgatattggctgtgggtttgtcatagatagctcttattattttgagatacgtcccatcaatacctaatttattgagagtttttagcatgaagggttgttgaattttgtcaaaggccttttctgtatctattgagataatcatgtggtttttgtctttggttctgtttatatgctggattacatttattgatttgcatatattgaaccagccttgcatcccagggatgaagcccacttgatcatggtggataagctttttgatgtgctgctggattcagtttgccagtattttattgaggatttttgcatcaatgttcatcaaggatattggtctaaaattctcttttttggttgtgtctctgcccggctttggtatcaggatgatgctggcctcatgagttagggaggattccctctttttctattgattggaatagtttcagaaggaatggtatcagttcctccttgtacctctggtagaattcggctgtgaatccatctggtcctggactctttttggttggtaagctattgattattgccacaatttcagctcctgttattggtctattcagagattcaacttcttccttgtttagtcttgggagggtgta

SEQ ID NO: 95338 - DNA, 13747 bp, Homo sapiens
catctcaactaaagaaaaaaaaggaaaactaggccgggtgcagtggcttaatgcctgtaatcccagcactttgggaggccaaggtaggtggctcacttgaggccaggagtttgagaccagcctggccaacatggcgaaaccccgtctctactaaaaatacaaaaattaatcaggcatggtggtgcatgcctgtaattccagctactcgggaggctgaggcaggagaattgcttgaacccaggaggcagaggttaaagaccctgtctcaaaaaaaaaaaaaaaggaaaactaggctgtgtgaagggtgaaggtggctcatgcctgtgatcccagcacttagggagggtgagatgggaggatcacttgagtccaggaatttgagaccagcctgggtaacataaggagaccccatcttttaaaaataaaaaaaaaaaaaaaacaaaaatagccagttgtggtggtgcgcgcctgtagtcccagctatttgggagactgatataggaggattgcttgagcccaggagtttgaggctacagtgggctgtgattgaggtactgcactccagcctgggccacagagtgagaccctgtctcaatatcctccacctgccaccccacccctccacaaaaaacaaacaaacaaaaaaactaaaaatatgtatactattaagctcttagtaaaagtttcctttcatagaaaatatagaatttttgcattcactttgcactttgaatcagttttttcccggtttagaaacaaccctaatgagagacaattcatttggaaaattggatgggttccagtttttttgctgtcagagaattggataaatagcctatatcatgtgataattactataaagcaatgaagcttgacagtgaggtgagggatttgaaaacatacagttaataagcaaggcgaattactaccctgtttgtaaatatggatacatttccaagagtgaaaaaaagaagttgataccatttatgttaaatataaccaaaacatgttacatgttatctggctacatgtaaatatacataaaacaagtggactagaaggctgcacaggacttgcagtgggacctctgggaatagggggagcaggatccacccggagctggaaggggccgtagagctagagttccctgttcttatttaaaaatcttcatgtccttgggccaggcgcggtggctcacgcctgtaatcccagcactttgggaggccgaggcaggtggatcacaaggtcatgaattcaagaccagcttggccaggatggtgaaaccccatctgtactaaaaatacaagaattagccgggcatggcggcaggcgcctgtaatcccagctactagagaggctgaggcaggagaattgcttgaacctgggaagtggaggttgcagtgagccaagactgcaccattgcactccagcctgggcaacagcgagactccgtcaaaaaacaaaacaaaacaaaaaaaaacttcatgtccttatatatttgtgtaatttagaaaagaacataaacaacaaatatgggaaaagatgaacaatggttaattctgtggagtgggagcatggtgggtgattattttgtttatgcttttaggtatgtttccaaccatcaaaccaaaaaaaaaagaaaaagagaaacagatccttgatcttaacaggaaatggctgtcattatgagtattatttctattccctgttttcatagaaaatgtggacacagacttgccaggcagcctggggcagagtgaagagaagcccgtgcctgctgcgcctgtgcccagcccggtggccccggccccagtgccatccagaagaaatccccctggcggcaagtccagcctcgtcttgggttagctctgactgtcctgaacgctgtcgttctgtctgtttcctccatgcttgtgaactgcacaacttgagcctgactgtacatctcttggatttgtttcattaaaaagaagcactttatgtactgctgtcttttttttttttcttttgaagaacaggtttctctctgtccttgactcttgggtctgtgggccatggcatgagtgttttctagtagtagattggagggaaagctttgtgacacttagtactgtgtttttaagaagaaataatttggttccagatgtgttagaggatcttttgtactgaggtttttaacactttacttgggtttaccaagcctcaactggacagaccataaacagtccacaggcaccgttcctgccaggccccaacccacagggagtctctccgcagagccttcttggtgttgccctaacttgccagtggcctttgctcagagcctcctcctgtgacatgtgaacaatgaagaggcctgcgcctcctgccttgccgcctgcaaagcaaagaaactgccttttattttttaaccttaaaaagtagccagatagtaacaagactggctggctgatgagcaaagcctttgctctcacgcagaggaaggcttggatgtacaatgaaactgcctggaactaaaagcagtgaagcaagggaggcaatcacactgaagcgggtcttcctccaggaacggggtcccacaggcgtgttgttttaaataacctgatgctgtgtgcatgatgctggtgcttgaccatgaaaggaaagtctcatccttaaaatgtgttgtacttcacaatcctggactgttgcttcaagtaaacaatatccacattttgaaacactgtgtactgtgtcttctttttgagatggtttcagtgttctccctggttagatgcttttctctttgtcactataaatcctgcctactgattggaggagtcatttgaagttaaatagccagatgtgcctgtaattagctacttgggaagccaaggcaagaggatgcttgagcccaggagtttgagactatcctgggcaacatagcgagacctccttaaaaaacaaaatcttaaaacagatgaagacccagagaggagtgggtttctttctgaagaaggctctaaagatgagcaggttagactcttctacctcccctttgttctgggcagtaacattttaaagtgttctccaagactgggcaacatggtgaaacctcgtctctaccaaaaatagccaggtgtgatggcacacgcctgtagtcgggaggctgaggcaggaggattgcttcaccctgtgagatcaaggctgcagtgagccatgatcgcaccactgtactccagcctgggtgacagcaagaccctgtctcaaaaaaagttctccaactttaaatatgcggggatttctccccaccagcaagcaagcaagcaagcaattctgcagtggataccagctaggtgtcctccaatttttttttttttttaagacagtgtctcagtctgtcgcccaggctgaagtgcagtggcacaatctgctcactgcaacctctgccttctgggttccagcgattctcctgcctcaccctcccgagtagctgggactacaggcatgtgccaccacacccagctaatttttgtatttttagtagagacagggtttatgccatgttgcccaggctggtgtcgaactcctgacctcaagtaatctgcccacctcgacttcccaaagtgctgggattataggcatgagccacctcacctggccctccaattcaattctgacaatcagttacctggagatagctttgattccacaagttgagggctcagcccccaagactgcttccccttgagataactcgcaagtctgggcctccaaaatgtctgcgtatctatgagtcatatgcatgttgacttgagcccctcttagactggtttgtcaggctttttttttttctgagatggagtctggctctgtcacccaggctggactgcagtggcatgatcttggctcactgcaacgtctgtctcccgggttcaagcaattctcctgccttggcctcctgagtagctgggatttgtaggcatgtcccaccatgcccggctagtttttgtatttttagtagagatggggtttcaccatgttggtcaggctggtctcgaactcctgactttgtgatccacctgcctcggcctcccaaaatgctgggattacaggcgtgagccactgcacccggccctgtcaggtttttttgtgtgtgtgatgcttctattacatgttttgtttgtttgtttgtttgagacggagtctcgctgtggcccaggctggagtgcagtggcgtggtcttggctcactgtaatctctgcctcccgggttcatgccattctcctacctcagcctcctgagtagctgggactacagtcacccgccaccatgcccagctaattttttttttttttttgtatttttagtagagacagggtttcaccgtgttagccaggatggtcctgatctcctgacctcatgatccgcccgcctcagcctcccaaagtgctgggattacaggcgtgagctaccgtgcccagcctctgttacatatatttggaagcagtgggttcatcagatggggaacaatggcgagatgggccacttaaatctgtgtttataattttggctctcccctcccccaacagggactccctctgtcacccaggctggagtgcagtggcaggatgaaggctgtgtagcctcaatttcctgggctcaagggttcctcccacctaaggctcatgagtagctaggaccacaggcatgcgccaccatacccagcttattgatttgtttattgtagagacagggtctccctgtgttgctcaggctggtcttgaactcctgggctcaagctgtctcccacctgggcctcccaaagtgctgggattaccagcctgagccacggcgcctggctttatagtttgtaggcaaatagatttgagtggagtcaggaagtttcatgacatccacaaaaagaagagtcaacaaaatgtatcacagttcagcatgttctttttttttttttttttttttgagaaggagttttgttcttgctgcccaggctggagggcaatggcatgatctcggctcaccgcaacctctgcctcctggattcaagagattctcctgcctcagcctcccgggtagctgggattacaagcatgtgccaccacgctaattttgtatttttagtagcgacaggatttctccatgttggtcaggctggtcttgaactcccgacctcagatgatccgcccgccacggcctcccaaagtgctgggattataggcgtgagccaccgcacctggccctgttcagcattttctagacgggagtaggtaagcgatgtcagttccacataaagtcctgaggacagtcctgattacctgtgcttgatcaaaatcatctttccgggggaaaccacacttgaagctcccatgtttcaagccaactctagtgtgaattagtctcttaacgagctagacttacacaaaccagttaacagattcatttcactttgtagtcctcgagggattgttcctgctccactgcacagacgaaagcaatccactgagaccacggtactgcggtaataagactttggccaggtgcggtggctcaagcctataatcccaacactttgggaggccaaggcaggcagatcacttgaggtcaggagtttgaaaccagcctgaccaacatggcgaaaccccgtctctactaaaactacaaaaattagccaggcgtggtggcgggtgcctgtaatcccagctactcgggaggctgaagcaagagaatcggttgaacccgggaagcggaggctgcagtgagccgagatcgcgccgccactgcgccgcagcctgggcgacagagccagactccgtctcaaaataaaaaaaaaaaaaaagaaaaaaagaaaaaaaatgtggagctagccccacgggtttaggacccttgactcctcgttagatgcttcccagtatctcagagcatccctttgttgggcccccggaaggtcggtcccctactagtaacgtggggtgaacgggggtacgtctgccgtaaagtgggaggcggctgatggggacaaaggctgggtcccgaagaagcgcagggtcagaaaagtgccccccaaagccgtccctgcacccgaaccctasgawggcctcgcgcaaccgcagggccgtcggcactggtttacgacctgggcggggcggcccggacactctatgcaaatcagcycggcggactccggaagcagcgctccctccgcttccggccgarcccrcgccccccagaccccgagagctcgcagctccggcccggcggcgatggcgcggagcgtgcgcgtgctggtggacatggacggcgtcctggccgacttcgaggccggcctcctgcggggcttccgccgccgcttccctgaggagccgcacgtgccgctggagcarcgccgcggcttcctggcccgcgagcagtaccgcgccctgcggcccgacctggcggtagggggcgcagggtccccacccgggcagggcccgctcgctccgttccgggggtctcccccttctctgtgaagggcgcagagctctcaccctggaacccgcgggcagcgcaccctggggaggagcctttgggcgcgtgcccctgaccgacgccccctccgcccctctgagctcgggcccggagcccccaggagcctccctgcgggtcctcgcgggaacgggaagccgggacccagaactcttgtctttcaggataaagtggccagtgtgtacgaagccccgggctttttcctggacctggagcccatcccgggagccttggacgctgtgcgggagatraacgacctaccggagtaaggagagaggggggcgggcggagtcctgggcgggctcctggctcccggcggtaacsgcgtccttctccgcagcacgcaggtcttcatctgcaccagccccctgctgaagtaccaccactgtgtgggtgagaaggtgtggctgccccgcccctactccgcacgwggagctgcctaaatcctgattttaaaaagaaaccaccagaaacccagaaggtgggggtggggggctctcaagggcttagagccaastccctatccctgaattccggcttccatcaggccctactcacagactgtgttttctacacagtaccgctgggtggagcagcacctggggccccagttcgtagaacgaattatcctgacaagggacaagacggtggtcttgggggacctgctcattgatgacaaggacacagttcgaggttggacccgttatccttggcagcctccaggcctctggcctgcccggattagggagagggagtaataatacccatgacagatggcagcgcgctgtctttcctgtcctaggccaggaggagaccccaagctgggagcacatcttgttcacctgctgccacaatcggcacctggtcctgcccccgacaaggagacggctgctctcctggagtgacaactggagggagatcttagatagcaagcgcggagctgcgcagcgggaatgagcggggatgccgcgggcagcagctggagctaaaggaagggcaggcccacaggggccaccgcagagccgagtcggggcggcatcgtgctggtgcctctggccccgtggagtggagcaggcagayaccgttaagcgctgtgctaccgggccccaggcccagccacccggtacctcccgagaggctgtccctggaccctggctggcatggaaatacagtgggaaaaccagtcgggacctttaataaaagaccttggctttctagtcttctaggaccctttatttgggaacataaagggacaggctccctgagcgggtgctgatgagcccttccctcccctctgagtccagtggtcccctaatctgccccatttccatgcccacgtgggtaccatttttgtagcacctgccattcctgggccatctaaggggtcagccttgagggggtacacgagaggcaaggacccccattttccctgagctccacctttccatcggatcccacgctccttatgttgaccagggggcaccatggacatggagccacatcctttacgttgccgtctcttcctgactcccttgagcaacactcactgcgtccctgatgccctcgtgggatacacttctggggtagggctccccatcattgagtgacagcagaggagggccgaagctttcagccggggccatggggtggcaaggggagaagatgcagttaccagggctggtgcctctattccgacgtatcatcacctgcatggccttgtgcttgatgcccgatggccacattaagtccctgggctgtcactcaagggcagggaccacatcttcatcttggagtcatggtgcctaacagcaaggctgggtggacagtcaatgctgggccacaggttatccaggttggcatccaccaggcccaaatgcccagcttggagagcccctgggggaggcatccatcctccagagccctggagggggcaccacatcttcccagggtgagatcctttcaccacgaggcatctcattcctatacctgaaaactactccagacacttctgttaagggataatccctgatttcctgcagcgaaggcagctctcctaagcctcaggcccagctcctgagaacactgtcctgcaaagcctctgggtccaggcacttggccgcttcttacaccagggcctgagtctggtggtggtggcacctgatgtaggattgagagtgccagcctatgaacgcagctccagtttgatcttctccgtgtctctggagtctggcttcctcactcccagtggcgtttcatcagtgtaaatgcctgtcctgctgaaagaacccgcctttcagatggctgaaaaggcaccaatggggcagtatgtgctccccgttccctgcgtccacatcaggactgtggtcyccagcagtaggggtgccacggtctcgcagtctccatggatcagcgctgccgtggggccacgctcctcggcagtgggatacccagggcagagtgcgcctgccggctgcgggcctcggccacctggcggggggagcagaagtcctccaggaagatctgtgccaggttccggagcctggygctggccgagagggagaagcgaagcatgcactgcaccacgggcgtggcggtcagctctgggagaaagctgcggcccggcgggctcaggtgcatgagcgtggtratggcagacagcaccgtctcctcattggggctggataggcagttgatgatgagtgggacacctcctgcgtgcaggatgtgctccttgttggccctgtctgggcacaggttgcacaggcctcctgtgggagagcaaggaagagtctggatgctgtagccccgggcctcctcccacctcccctgcccgtgagccccaggtaggggcccaggctgttgagaagctggccccagcacaaggcatccaaagcccattccggctcctgccttctcaagtttccagaaaggcctgcctgcctgctccagcctgccacagcccacccttccagaagtgggcacaaatccctttccctctcagttcagcaagttcaatggctgatacgctttttttttcccctttcttaaatgtaaaaacctaaaacaaggccggcccaggcacggtggttcacgcctgtaatcccagcactttggaaggctgaagtgagtggatcacctgaggtcacgagtccgagaccagcctggccaacatggtgaaactgtctctactaaaaatacaaaaattagccgggtgtggtggcaggtgcctgtaatcccagctacttgtgaggctgaggcaggagaattgcttgaacctgggactcggaggttgcagtgagccgagattgcatcactgcactccagcctgggcaacagagctagactctgtctcagaaataaataaataaataaaaaactaaaaccctgtaatgtatcatcaccttagaacagtttataaaagttataaaaatataagatgatggtttcatgggtatatacttatgccaaaatttatcaaattgtaccctttaaatatgtacagtttattatgtccatcatatagcaataaaactgttaaaatactagaatgggctgggcacagtggctcacacctgtaattccagtgctttggcaggccaaggcaggaggatcccttgagcccaggaattcgagaccagccttggcgacatggcaaaactctgtcgctaccaaaacacacacaattagccaggcatgatggtacacgcctgtagtctcagctacttgagaggctgaggtgggaggactgcttgggcccacgaagtggagctgcagtaagccatgaacgcaccactgcactccagcctgggcgacagagtgagaccctgtctcaaaaacaaacaaatggctgggagcggtggctcacgcctataatcccagcactttgggaggccgaggtgggtggatcaccctgaggtcaggagttccagaccagcctggccaacatggtgaaaccccgtctctactaaaaacacaaaaattagctgggcctgtggcacatgcttgtaatcccagctacttgggaggctgaggcagaatagcttgaacccggtaggtggaggttgccgagatggcaccactgcattccagcctgggcaacagagcaaatactacgtctcaatgttaggcggctgacctaacatttgtttttcattctacaatttgaaatatgtgaatatatgtaagtatttagtaaaaatgggatactctgcttgctgcttggtcagttttctgagatggggtgggatctccctatgttgtccagtctggtcttgaacttccggctttaagccatccttctgcctcagcctccctgggagttaagactgactccaggcatgcaccactgtgcatggcttacgccagcttttttttttttttttttgagacagttttgccctgttgcccaggctagagtgcagtggcatgatcgcggctcattgcaacctccgcctcccaggttcaagtgattctcctgcctcagcctcccaagtagctgggataaccggcatgtgccaccatgcccggctaaatttttgtatttttagtagagacggggtttcaccatgttggccaggctggtctcgaactcctgacctcaggtgttccacccgcctcggcctcccaaagtgctgggattacaggcatgagccactgtgccccgcccagcttttttcatttaccaatatattgtgattagcggggcatggttgagcacacctatagtcccagctactagggaggcttaggcaggagagttgcttgaacccaggaggctgaggttgcaatgagctgagattgcgccattgcactccagcctgagcaaacgagtgaaactccatctcaaaaaaaaaaaacaaaaacaaaaaaacaatgtattgtgaacatctttccatgccaataaattcacattcatggctatgcagtgattgtagattaatggtaaggagtgtaccatttgacagatatagtgtaattaagagaatagagcattttaatgttatttccatgtcaccgttactaggattctgggggaaaacagaaaaggcaacagtgacagatcagtggttctggatcaaagaactcacgtgctcaggtaatgtggctggaatcccactcccattccctcaagtcaggccccctcaatgtaatgacctcttagccttggggacagatgctaccttgttttggaggtcactctgctcagcactggctgctccctgcgggaagatgacttcctgtgcatcctgagcttcctgtcatcacggtacccctccctttggttcctgctcagtggaggaagccacctctcagctcatttgcaaaacatgcccagtgtcctgagtgaccaatcagtgaaggccacagctctacccacttcccctgtttttctggaaactaacaaagagaagacttacctgaacctgaaacccaactaagacatcttccccagccagagggacaggtgcccatggtgcccccgccaaggaccctcctccactgactggggcaggagtctgccaaggtttcactctgctgcctgctcccaagcagcacctgggtcaggctggtcctgctttgagggaaccttttttatttttgagatggagtttcactctttcacccaggctggagtgaagtggcgcgatctcggctcactgcaacctccgccccaccaggttcaagtgattctcttgcctcagcctcccaagtagctgggattacaggtacatgccaccacacctggctaattttttttttgtatttttagtagagacagggtttcgccatgttagccaggctggtcttaaactcttgacctcaggtgatccacccatcttggcctcccaaagtgctaggattacgggtgtgagccaccgtgcccagctgggggaacattattaaaggatcccactgcatgtggagtaaattccagatgtccgtgtgctccttacccctgagccgtcctgtctgttcttccctctccctggcactcattgcagtctccaacctcagtccatccctgagacctttcagcccccagttgtcacacactgacaccctcttgctggtaacaagccctccactgctctccttgcaagtggcgtcttcctgggatacccgactaggcgctctaccatgtcagggcagcccttcatcacctgatcctttaagcactgacccgggggggaaagggttcaaagaaccgcagatggtcagggggctggacagtgtggctccctgacatcctgcccaccctggacttctgtagttcttagatctgggctgcagctcacaggcaggacacatctgagggagggaaggagctctttggcctctctggagtcctgagaaagagtagcagcagcagagggcaagcaggccctgactgagcgcctctccccatggggcccttggagcctcccttgccagtcccacttcagcacttgctaaagcacagggtggcccctagcgtggctgtggcgttctgtaggctgccttttgtccttgctctgtcccttccaccaggagctataaggcagggctcaagttcctagaaccgtggacacttcactgagcacgcactggacacatgactgaaccctagaaataagtgctaacatcacccccatttccatgggagaagtcaaggctatgagagactgagtgagctgcccaaaacgctaaagagatgggagccttctgcccctcggccctcccatgggaaatggcggccctcccatgggaaatggcggggccctctggaagcagtaaggacaacgaatccagccttgggcagatgccaggctcagtctggagcaggggcagtggaagtgctgtggtcggactcttctgctcagacacacccgcggcatgtctcccgagctgacgggagcggccttcctgtgcacactggactgcgggtggggtgatgggatttctctctgtgtaaagtgtgataagatgaagcctgagtcactgcctggcagctgagtcatcaccacacccaggtgcgcctgggcagggcactgccacccagactgcggaaaaccagagggtgggggcaggaggaggcctcaggagagccaccctctccctccctccccacacagaggcctaggagtctccaaggatggaccgggtgcctgccagagctcaccagctgcttggaccctctccgcagtggcagggaactcctgaagctcctctgcctagcgggtagtgt
